(19) United States
(12) Patent Application Publication
(10) Pub. No.: US 2023/0037682 A1
(43) Pub. Date: Feb. 9, 2023

(54) BINDING MOLECULES AGAINST CD3 AND USES THEREOF

(71) Applicant: NOVARTIS AG, Basel (CH)

(72) Inventors: Brian Walter GRANDA, Salisbury, MA (US); Daniel LENHERR-FREY, Uster (CH); Xuerui LUO, Pudong New Area, Shanghai (CN); Amy RAYO, Cambridge, MA (US); Fei ZHANG, Pudong New Area, Shanghai (CN); Jiquan ZHANG, Pudong New Area, Shanghai (CN)

(21) Appl. No.: 17/311,315

(22) PCT Filed: Dec. 4, 2019
(86) PCT No.: PCT/CN2019/122876

§ 371 Date: Jun. 4, 2021

(30) Foreign Application Priority Data
Dec. 4, 2018 (CN) PCT/CN2018/119074

(51) Int. Cl. C07K 16/28

(52) U.S. Cl. CPC C07K 16/2809; C07K 2317/24; C07K 2317/92; C07K 2317/75; C07K 2317/31

(57) ABSTRACT

Provided are CD3 binding molecules that specifically bind to CD3, for example monospecific binding molecules that specifically bind to CD3 and multispecific binding molecules (MBMs) that specifically bind to CD3 and a tumor-associated antigen, conjugates comprising the CD3 binding molecules, and pharmaceutical compositions comprising the CD3 binding molecules and conjugates. Provided are methods of using the CD3 binding molecules, conjugates, and pharmaceutical compositions to activate T cells in a subject, for example a subject having a cancer or autoimmune disease. Provided are recombinant host cells engineered to express the CD3 binding molecules and methods of producing the CD3 binding molecules by culturing the host cells under conditions in which the CD3 binding molecules are expressed.

### 1. CROSS-REFERENCE TO RELATED APPLICATIONS

[0001] This application claims the priority benefit of PCT application no. PCT/CN2018/119074, filed Dec. 4, 2018, the contents of which are incorporated herein by reference in their entirety.

### 2. SEQUENCE LISTING

[0002] The instant application contains a Sequence Listing which has been submitted electronically in ASCII format and is hereby incorporated by reference in its entirety. The ASCII copy, created on Dec. 3, 2019 is named NOV-010WO_SL.txt and is 782,920 bytes in size.

### 3. INCORPORATION BY REFERENCE

[0003] All publications, patents, patent applications and other documents cited in this application are hereby incorporated by reference in their entireties for all purposes to the same extent as if each individual publication, patent, patent application or other document were individually indicated to be incorporated by reference for all purposes. In the event that there is an inconsistency between the teachings of one or more of the references incorporated herein and the present disclosure, the teachings of the present specification are intended.

### 4. BACKGROUND

[0004] The conception of bi-specific and multi-specific antibodies arose from the idea that diseases are normally multi-factorial, and addressing more than one disease factor, but with a single antibody could increase efficacy. Cluster of differentiation 3 (CD3) is a homodimeric or heterodimeric antigen expressed on T cells in association with the T cell receptor complex (TCR) and is required for T cell activation. Antibodies against CD3 have been shown to cluster CD3 on T cells, thereby causing T cell activation in a manner similar to the engagement of the TCR by peptide-loaded MHC molecules. Anti-CD3 antibodies have been proposed for therapies involving the activation of T cells. Anti-CD3 antibodies have been used for the treatment of proliferative disorders such as cancer and for the treatment of autoimmune diseases. In addition, bispecific and multi-specific antibodies that are capable of binding CD3 and a target antigen have been proposed for therapeutic uses involving targeting T cell immune responses to tissues and cells expressing the target antigen. There are currently approved bispecific antibodies on the market, such as the CD19/CD3 BiTE, blinatumomab. However, bispecifics and multi-specific antibodies still face challenges of biodistribution, inhibitory microenvironments and antigen loss. As such, there is a need in the art for superior bispecific and multi-specific antibodies. Bispecific and multi-specific antigen-binding molecules that bind both CD3 and a target antigen would be useful in therapeutic settings in which specific targeting and T cell-mediated killing of cells that express the target antigen is desired.

[0005] There is a need for new CD3 binding molecules, e.g. antibodies and multispecific binding molecules, which bind CD3.

### 5. SUMMARY

[0006] The disclosure provides CD3 binding molecules that specifically bind to human CD3, e.g., antibodies, antigen-binding fragments thereof, and multispecific molecules that specifically bind to human CD3.

[0007] In one aspect, the disclosure provides monospecific CD3 binding molecules (e.g., antibodies and antigen-binding fragments thereof) comprising a CD3 antigen-binding domain or antigen-binding module (“ABM”). Exemplary CD3 binding molecules, which can be monospecific, are described in Section 7.2 and specific embodiments 1 to 456, infra.

[0008] In another aspect, the disclosure provides multispecific binding molecules (“MBMs”) comprising the CD3 ABMs, for example bispecific and multi-specific antibodies. Accordingly, in one aspect, the present disclosure is directed to bispecific and multi-specific antibodies comprising at least two separate antigen-binding domains or ABMs. In some aspects, the present disclosure provides bispecific and multi-specific binding molecules that engage a tumor-associated antigen (“TAA”) and CD3 and/or CD2 or other component of a TCR complex on T-cells.

[0009] In certain embodiments, the MBMs are bispecific binding molecules (“BBMs”). The BBMs comprise a first ABM that specifically binds to human CD3 (“ABM1” or “CD3 ABM”) and a second ABM that specifically binds to a second antigen (“ABM2”), e.g., a human TAA (sometimes referred to herein as a “TAA ABM”). The terms ABM1, ABM2, CD3 ABM, and TAA ABM are used merely for convenience and are not intended to convey any particular configuration of a BBM. Such multispecific molecules can be used to direct CD3+ effector T cells to TAA+ sites, thereby allowing the CD3+ effector T cells to attack and lyse the TAA+ cells and tumors. Features of exemplary MBMs are described in Sections 7.5 to 7.7 and specific embodiments 457 to 536, infra.

[0010] In certain embodiments, the MBMs are trispecific binding molecules (“TBMs”). The TBMs comprise a first ABM that specifically binds to human CD3 (“ABM1” or “CD3 ABM”), a second ABM (“ABM2”) that specifically binds to a second antigen, e.g., a human TAA, and a third ABM (“ABM3”) that specifically binds to a third antigen, e.g., a second human TAA or human CD2. TBMs that bind to (1) human CD3, (2) a TAA, and (3) CD2 are referred to herein as “Type 1 TBMs” for convenience. TBMs that bind to (1) human CD3, (2) a first TAA (sometimes referred to as “TAA 1”), and (3) a second TAA (sometimes referred to as “TAA 2”) are referred to herein as “Type 2 TBMs” for convenience. Because both TAA 1 and TAA 2 are tumor associated antigens, the designations of the tumor associated antigens of the disclosure as TAA 1 and TAA 2 are arbitrary—thus, any disclosure pertaining to TAA 1 is applicable to TAA 2 and vice versa, unless the context dictates otherwise.

[0011] In some embodiments, each antigen-binding module of a MBM is capable of binding its respective target at the same time as each of the one or more additional antigen-binding modules is bound to its respective target.

[0012] In the MBMs, each ABM (other than ABM1, which is immunoglobulin-based) can be immunoglobulin- or non-immunoglobulin-based, and therefore the MBMs can include immunoglobulin-based ABMs, non-immunoglobulin-based ABMs, or a combination thereof. Immunoglobulin-based ABMs that can be used in the MBMs are described in Section 7.3.1 and specific embodiments 1 to 469, infra. Non-immunoglobulin-based ABMs that can be used in the MBMs are described in Section 7.3.2 and specific embodiments 747 to 777, infra. Further features of exemplary ABMs that bind to a component of a TCR complex are described in Section 7.8, infra. Further features of exemplary ABMs that bind to CD2 are described in Section 7.9 and specific embodiments 746 to 789, infra. Further features of exemplary ABMs that bind to TAAs are described in Section 7.10 and specific embodiments 592 to 745 and 790 to 946, infra.

[0013] The ABMs of a MBM (or portions thereof) can be connected to each other, for example, by short peptide linkers or by an Fc domain. Methods and components for connecting ABMs to form a MBM are described in Section 7.4 and specific embodiments 947 to 1155, infra.

[0014] MBMs have at least two ABMs (i.e., a MBM is at least bivalent), but can also have more than two ABMs. For example, a MBM can have three ABMs (i.e., is trivalent), four ABMs (i.e., is tetravalent), five ABMs (i.e., is pentavalent), or six ABMs (i.e., is hexavalent). In some embodiments, a MBM has at least one ABM that can bind a TAA, at least one ABM that can bind CD3, and at least one ABM that can bind another antigen. Exemplary bivalent, trivalent, tetravalent, pentavalent, and hexavalent MBM configurations are described in Sections 7.5 to 7.7 and specific embodiments 477 to 536 and 554 to 590, infra.

[0015] The disclosure further provides nucleic acids encoding the CD3 binding molecules (e.g., MBMs) (either in a single nucleic acid or a plurality of nucleic acids) and recombinant host cells and cell lines engineered to express the nucleic acids and CD3 binding molecules (e.g., MBMs). Exemplary nucleic acids, host cells, and cell lines are described in Section 7.11 and specific embodiments 1439 to 1441, infra.

[0016] The present disclosure further provides drug conjugates comprising the CD3 binding molecules (e.g., MBMs). Such conjugates are referred to herein as “antibody-drug conjugates” or “ADCs” for convenience, notwithstanding that some of the ABMs can be non-immunoglobulin domains. Examples of ADCs are described in Section 7.12 and specific embodiments 1225 to 1262, infra.

[0017] Pharmaceutical compositions comprising the CD3 binding molecules (e.g., MBMs) and ADCs are also provided. Examples of pharmaceutical compositions are described in Section 7.14 and specific embodiment 1263, infra.

[0018] Further provided herein are methods of using the CD3 binding molecules (e.g., MBMs), the ADCs, and the pharmaceutical compositions, for example for treating proliferative conditions (e.g., cancers), on which TAAs are expressed. Exemplary methods are described in Section 7.15 and specific embodiments 1264 to 1437, infra.

[0019] The disclosure further provides methods of using the CD3 binding molecules (e.g., MBMs), the ADCs, and the pharmaceutical compositions in combination with other agents and therapies. Exemplary agents, therapies, and methods of combination therapy are described in Section 7.16 and specific embodiment 1438, infra.

### 6. BRIEF DESCRIPTION OF THE FIGURES

[0020] FIGS. 1A-1AH show exemplary BBM configurations. FIG. 1A illustrates components of the exemplary BBM configurations illustrated in FIGS. 1B-1AH. Not all regions connecting the different domains of each chain are illustrated (e.g., the linker connecting the VH and VL domains of an scFv, the hinge connecting the CH2 and CH3 domains of an Fc domain, etc., are omitted). FIGS. 1B-1F illustrate bivalent BBMs; FIGS. 1G-1Z illustrate trivalent BBMs; FIGS. 1AA-1AH illustrate tetravalent BBMs. In the BBMs, a variant CD58 domain can substitute for a Fab and/or scFv in any of the configurations illustrated.

[0021] FIGS. 2A-2V show exemplary TBM configurations. FIG. 2A illustrates components of the exemplary TBM configurations illustrated in FIGS. 2B-2V. Not all regions connecting the different domains of each chain are illustrated (e.g., the linker connecting the VH and VL domains of an scFv, the hinge connecting the CH2 and CH3 domains of an Fc, etc., are omitted). FIG. 2B-2P illustrates trivalent TBMs; FIGS. 2Q-2S illustrate tetravalent TBMs; FIG. 2T illustrates a pentavalent TBM, and FIGS. 2U-2V illustrate hexavalent TBMs. In the TBMs, a variant CD58 domain can substitute for a Fab and/or scFv in any of the configurations illustrated.

[0022] FIGS. 3A-3E show exemplary MBM configurations. FIG. 3A depicts a normal IgG format, FIG. 3B shows a BITE configuration, FIG. 3C is a bispecific configuration, FIG. 3D is a trispecific configuration and FIG. 3E is a tetraspecific configuration.

[0023] FIGS. 4A-4D are surface plasmon resonance (SPR/Biacore) measurements, showing the Kd for CD3. FIG. 4A: NOV292; FIG. 4B: sp34; FIG. 4C: NOV123; FIG. 4D: sp1c.

[0024] FIG. 5 shows the binding of anti-CD3 antibodies to cells transfected with human CD3.

[0025] FIG. 6 shows the binding of anti-CD3 antibodies to cells transfected with human CD3.

[0026] FIG. 7 shows the binding of anti-CD3 antibodies to cells transfected with human CD3.

[0027] FIG. 8 shows the binding of anti-CD3 antibodies to cells transfected with cynomolgus monkey (cyno) CD3.

[0028] FIG. 9 shows the binding of anti-CD3 antibodies to cells transfected with cynomolgus monkey (cyno) CD3.

[0029] FIG. 10 shows the binding of anti-CD3 antibodies to cells transfected with cynomolgus monkey (cyno) CD3.

[0030] FIG. 11 demonstrates agonist activation of CD3 by bispecific antibodies in a JNL cell model.

[0031] FIG. 12 demonstrates agonist activation of CD3 by bispecific antibodies in a JNL cell model.

[0032] FIG. 13 demonstrates agonist activation of CD3 by bispecific antibodies in a JNL cell model.

[0033] FIG. 14 demonstrates agonist activation of CD3 by bispecific antibodies in a JNL cell model.

[0034] FIG. 15 demonstrates agonist activation of CD3 by bispecific antibodies in a JNL cell model.

[0035] FIG. 16 shows the ability of an anti-CD19/anti-CD3 bispecific antibody to lyse target cells in a Redirected T-Cell Cytotoxcity (RTCC) assay.

[0036] FIG. 17 shows the ability of an anti-CD19/anti-CD3 bispecific antibody to lyse target cells in a Redirected T-Cell Cytotoxcity (RTCC) assay.

[0037] FIG. 18 shows the ability of anti-CD19/anti-CD3 bispecific antibodies to lyse target cells in a RTCC assay. “OKT3” and “sp34” refer to positive control bispecific antibodies.

[0038] FIG. 19 shows affinity of of anti-CD19/anti-CD3 bispecific antibodies for CD3+ T cells. “OKT3” and “sp34” refer to positive control bispecific antibodies.

[0039] FIG. 20 shows the ability of anti-CD19/anti-CD3 bispecific antibodies to lyse target cells in a RTCC assay. “OKT3,” “sp34,” and “H2C” refer to positive control bispecific antibodies.

[0040] FIG. 21 shows the ability of anti-CD19/anti-CD3 bispecific antibodies to lyse target cells in a RTCC assay. “OKT3,” “sp34,” and “H2C” refer to positive control bispecific antibodies.

[0041] FIG. 22 shows the ability of anti-CD19/anti-CD3 bispecific antibodies to lyse target cells in a RTCC assay. “OKT3” and “sp34” refer to positive control bispecific antibodies.

[0042] FIG. 23 shows affinity of of anti-CD19/anti-CD3 bispecific antibodies for CD3+ T cells. “OKT3” and “sp34” refer to positive control bispecific antibodies.

### 7. DETAILED DESCRIPTION

### 7.1. Definitions

[0043] As used herein, the following terms are intended to have the following meanings:

[0044] Antigen-binding module: The term “antigen-binding module” or “ABM” as used herein refers to a portion of a MBM of the disclosure that has the ability to bind to an antigen non-covalently, reversibly and specifically. An ABM can be immunoglobulin- or non-immunoglobulin-based. As used herein, the terms “ABM1” and “CD3 ABM” (and the like) refers to an ABM that binds specifically to CD3, and the term “ABM2” and “TAA ABM” (and the like) refer to an ABM that binds specifically to a tumor-associated antigen. The terms ABM1 and ABM2 etc., are used merely for convenience and are not intended to convey any particular configuration of a MBM.

[0045] Antibody: The term “antibody” as used herein refers to a polypeptide (or set of polypeptides) of the immunoglobulin family that is capable of binding an antigen non-covalently, reversibly and specifically. For example, a naturally occurring “antibody” of the IgG type is a tetramer comprising at least two heavy (H) chains and two light (L) chains inter-connected by disulfide bonds. Each heavy chain is comprised of a heavy chain variable region (abbreviated herein as VH) and a heavy chain constant region. The heavy chain constant region is comprised of three domains, CH1, CH2 and CH3. Each light chain is comprised of a light chain variable region (abbreviated herein as VL) and a light chain constant region. The light chain constant region is comprised of one domain (abbreviated herein as CL). The VH and VL regions can be further subdivided into regions of hypervariability, termed complementarity determining regions (CDR), interspersed with regions that are more conserved, termed framework regions (FR). Each VH and VL is composed of three CDRs and four FRs arranged from amino-terminus to carboxy-terminus in the following order: FR1, CDR1, FR2, CDR2, FR3, CDR3, FR4. The variable regions of the heavy and light chains contain a binding domain that interacts with an antigen. The constant regions of the antibodies can mediate the binding of the immunoglobulin to host tissues or factors, including various cells of the immune system (e.g., effector cells) and the first component (Clq) of the classical complement system. The term “antibody” includes, but is not limited to, monoclonal antibodies, human antibodies, humanized antibodies, camelised antibodies, chimeric antibodies, bispecific or multispecific antibodies and anti-idiotypic (anti-Id) antibodies (including, e.g., anti-Id antibodies to antibodies of the disclosure). The antibodies can be of any isotype/class (e.g., IgG, IgE, IgM, IgD, IgA and IgY) or subclass (e.g., IgG1, IgG2, IgG3, IgG4, IgA1 and IgA2).

[0046] Both the light and heavy chains are divided into regions of structural and functional homology. The terms “constant” and “variable” are used functionally. In this regard, it will be appreciated that the variable domains of both the light (VL) and heavy (VH) chain portions determine antigen recognition and specificity. Conversely, the constant domains of the light chain (CL) and the heavy chain (CH1, CH2 or CH3) confer important biological properties such as secretion, transplacental mobility, Fc receptor binding, complement binding, and the like. By convention, the numbering of the constant region domains increases as they become more distal from the antigen-binding site or amino-terminus of the antibody. The N-terminus is a variable region and at the C-terminus is a constant region; the CH3 and CL domains actually comprise the carboxy-terminus of the heavy and light chain, respectively.

[0047] Antibody fragment: The term “antibody fragment” of an antibody as used herein refers to one or more portions of an antibody. In some embodiments, these portions are part of the contact domain(s) of an antibody. In some other embodiments, these portion(s) are antigen-binding fragments that retain the ability of binding an antigen non-covalently, reversibly and specifically, sometimes referred to herein as the “antigen-binding fragment”, “antigen-binding fragment thereof,” “antigen-binding portion”, and the like. Examples of binding fragments include, but are not limited to, single-chain Fvs (scFv), a Fab fragment, a monovalent fragment consisting of the VL, VH, CL and CH1 domains; a F(ab)2 fragment, a bivalent fragment comprising two Fab fragments linked by a disulfide bridge at the hinge region; a Fd fragment consisting of the VH and CH1 domains; a Fv fragment consisting of the VL and VH domains of a single arm of an antibody; a dAb fragment (Ward et al., (1989) Nature 341:544-546), which consists of a VH domain; and an isolated complementarity determining region (CDR). Thus, the term “antibody fragment” encompasses both proteolytic fragments of antibodies (e.g., Fab and F(ab)2 fragments) and engineered proteins comprising one or more portions of an antibody (e.g., an scFv).

[0048] Antibody fragments can also be incorporated into single domain antibodies, maxibodies, minibodies, intrabodies, diabodies, triabodies, tetrabodies, v-NAR and bis-scFv (see, e.g., Hollinger and Hudson, 2005, Nature Biotechnology 23: 1126-1136). Antibody fragments can be grafted into scaffolds based on polypeptides such as Fibronectin type III (Fn3) (see U.S. Pat. No. 6,703,199, which describes fibronectin polypeptide monobodies).

[0049] Antibody fragments can be incorporated into single chain molecules comprising a pair of tandem Fv segments (for example, VH-CH1-VH-CH1) which, together with complementary light chain polypeptides (for example, VL-VC-VL-VC), form a pair of antigen-binding regions (Zapata et al., 1995, Protein Eng. 8:1057-1062; and U.S. Pat. No. 5,641,870).

[0050] Antigen-binding domain: The term “antigen-binding domain” refers a portion of a molecule that has the ability to bind to an antigen non-covalently, reversibly and specifically. Exemplary antigen-binding domains include antigen-binding fragments and portions of both immunoglobulin and non-immunoglobulin based scaffolds that retain the ability of binding an antigen non-covalently, reversibly and specifically. As used herein, the term “antigen-binding domain” encompasses antibody fragments that retain the ability of binding an antigen non-covalently, reversibly and specifically.

[0051] Half Antibody: The term “half antibody” refers to a molecule that comprises at least one ABM or ABM chain and can associate with another molecule comprising an ABM or ABM chain through, e.g., a disulfide bridge or molecular interactions (e.g., knob-in-hole interactions between Fc heterodimers). A half antibody can be composed of one polypeptide chain or more than one polypeptide chains (e.g., the two polypeptide chains of a Fab). In a preferred embodiment, a half-antibody comprises an Fc region.

[0052] An example of a half antibody is a molecule comprising a heavy and light chain of an antibody (e.g., an IgG antibody). Another example of a half antibody is a molecule comprising a first polypeptide comprising a VL domain and a CL domain, and a second polypeptide comprising a VH domain, a CH1 domain, a hinge domain, a CH2 domain, and a CH3 domain, wherein said VL and VH domains form an ABM. Yet another example of a half antibody is a polypeptide comprising an scFv domain, a CH2 domain and a CH3 domain.

[0053] A half antibody might include more than one ABM, for example a half-antibody comprising (in N- to C-terminal order) an scFv domain, a CH2 domain, a CH3 domain, and another scFv domain.

[0054] Half antibodies might also include an ABM chain that when associated with another ABM chain in another half antibody forms a complete ABM.

[0055] Thus, a MBM can comprise one, more typically two, or even more than two half antibodies, and a half antibody can comprise one or more ABMs or ABM chains.

[0056] In some MBMs, a first half antibody will associate, e.g., heterodimerize, with a second half antibody. In other MBMs, a first half antibody will be covalently linked to a second half antibody, for example through disulfide bridges or chemical crosslinking. In yet other MBMs, a first half antibody will associate with a second half antibody through both covalent attachments and non-covalent interactions, for example disulfide bridges and knob-in-hole interactions.

[0057] The term “half antibody” is intended for descriptive purposes only and does not connote a particular configuration or method of production. Descriptions of a half antibody as a “first” half antibody, a “second” half antibody, a “left” half antibody, a “right” half antibody or the like are merely for convenience and descriptive purposes.

[0058] Complementarity Determining Region: The terms “complementarity determining region” or “CDR,” as used herein, refer to the sequences of amino acids within antibody variable regions which confer antigen specificity and binding affinity. For example, in general, there are three CDRs in each heavy chain variable region (e.g., CDR-H1, CDR-H2, and CDR-H3) and three CDRs in each light chain variable region (CDR-L1, CDR-L2, and CDR-L3). The precise amino acid sequence boundaries of a given CDR can be determined using any of a number of well-known schemes, including those described by Kabat et al., 1991, “Sequences of Proteins of Immunological Interest,” 5th Ed. Public Health Service, National Institutes of Health, Bethesda, Md. (“Kabat” numbering scheme), Al-Lazikani et al., 1997, JMB 273:927-948 (“Chothia” numbering scheme) and ImMunoGenTics (IMGT) numbering (Lefranc, 1999, The Immunologist 7:132-136 (1999); Lefranc et al., 2003, Dev. Comp. Immunol. 27:55-77 (“IMGT” numbering scheme). For example, for classic formats, under Kabat, the CDR amino acid residues in the heavy chain variable domain (VH) are numbered 31-35 (CDR-H1), 50-65 (CDR-H2), and 95-102 (CDR-H3); and the CDR amino acid residues in the light chain variable domain (VL) are numbered 24-34 (CDR-L1), 50-56 (CDR-L2), and 89-97 (CDR-L3). Under Chothia, the CDR amino acids in the VH are numbered 26-32 (CDR-H1), 52-56 (CDR-H2), and 95-102 (CDR-H3); and the amino acid residues in VL are numbered 26-32 (CDR-L1), 50-52 (CDR-L2), and 91-96 (CDR-L3). By combining the CDR definitions of both Kabat and Chothia, the CDRs consist of amino acid residues 26-35 (CDR-H1), 50-65 (CDR-H2), and 95-102 (CDR-H3) in human VH and amino acid residues 24-34 (CDR-L1), 50-56 (CDR-L2), and 89-97 (CDR-L3) in human VL. Under IMGT the CDR amino acid residues in the VH are numbered approximately 26-35 (CDR-H1), 51-57 (CDR-H2) and 93-102 (CDR-H3), and the CDR amino acid residues in the VL are numbered approximately 27-32 (CDR-L1), 50-52 (CDR-L2), and 89-97 (CDR-L3) (numbering according to “Kabat”). Under IMGT, the CDR regions of an antibody can be determined using the program IMGT/DomainGap Align.

[0059] Single Chain Fv or scFv: The term “single-chain Fv” or “scFv” as used herein refers to antibody fragments comprise the VH and VL domains of an antibody, wherein these domains are present in a single polypeptide chain. Preferably, the Fv polypeptide further comprises a polypeptide linker between the VH and VL domains which enables the scFv to form the desired structure for antigen-binding. For a review of scFv see Pluckthun in The Pharmacology of Monoclonal Antibodies, vol. 113, Rosenburg and Moore eds., (1994) Springer-Verlag, New York, pp. 269-315.

[0060] Diabody: The term “diabody” as used herein refers to small antibody fragments with two antigen-binding sites, typically formed by pairing of scFv chains. Each scFv comprises a heavy chain variable domain (VH) connected to a light chain variable domain (VL) in the same polypeptide chain (VH-VL, where the VH is either N-terminal or C-terminal to the VL). Unlike a typical scFv in which the VH and VL are separated by a linker that allows the VH and VL on the same polypeptide chain to pair and form an antigen-binding domain, diabodies typically comprise a linker that is too short to allow pairing between the VH and VL domains on the same chain, forcing the VH and VL domains to pair with the complementary domains of another chain and create two antigen-binding sites. Diabodies are described more fully in, for example, EP 404,097; WO 93/11161; and Hollinger et al., 1993, Proc. Natl. Acad. Sci. USA 90:6444-6448.

[0061] Fv: The term “Fv” refers to the minimum antibody fragment derivable from an immunoglobulin that contains a complete target recognition and binding site. This region consists of a dimer of one heavy and one light chain variable domain in a tight, noncovalent association (VH-VL dimer). It is in this configuration that the three CDRs of each variable domain interact to define a target binding site on the surface of the VH-VL dimer. Often, the six CDRs confer target binding specificity to the antibody. However, in some instances even a single variable domain (or half of an Fv comprising only three CDRs specific for a target) can have the ability to recognize and bind target. The reference to a VH-VL dimer herein is not intended to convey any particular configuration. By way of example and not limitation, the VH and VL can come together in any configuration described herein to form a half antibody, or can each be present on a separate half antibody and come together to form an antigen binding domain when the separate half antibodies associate, for example to form a MBM of the disclosure. When present on a single polypeptide chain (e.g., a scFv), the VH and be N-terminal or C-terminal to the VL.

[0062] Multispecific binding molecules: The term “multispecific binding molecules” or “MBM” refers to molecules that comprise at least two antigen-binding domains, wherein at least one of the antigen binding domains is CD3 and least one antigen-binding domain which is specific for a TAA. The antigen-binding domains can each independently be an antibody fragment (e.g., scFv, Fab, nanobody), a ligand, or a non-antibody derived binder (e.g., fibronectin, Fynomer, DARPin). Representative MBMs are illustrated in FIGS. 3A-3E. MBMs can comprise one, two, three, four or even more polypeptide chains.

[0063] VH: The term “VH” refers to the variable region of an immunoglobulin heavy chain of an antibody, including but not limited to the heavy chain of an Fv, scFv, dsFv or Fab.

[0064] VL: The term “VL” refers to the variable region of an immunoglobulin light chain, including but not limited to the light chain of an Fv, scFv, dsFv or Fab.

[0065] Operably linked: The term “operably linked” refers to a functional relationship between two or more peptide or polypeptide domains or nucleic acid (e.g., DNA) segments. In the context of a fusion protein or other polypeptide, the term “operably linked” means that two or more amino acid segments are linked to produce a functional polypeptide. For example, in the context of a MBM of the disclosure, separate ABMs (or chains of an ABM) can be through peptide linker sequences. In the context of a nucleic acid encoding a fusion protein, such as a a polypeptide chain of a MBM of the disclosure, “operably linked” means that the two nucleic acids are joined such that the amino acid sequences encoded by the two nucleic acids remain in-frame. In the context of transcriptional regulation, the term refers to the functional relationship of a transcriptional regulatory sequence to a transcribed sequence. For example, a promoter or enhancer sequence is operably linked to a coding sequence if it stimulates or modulates the transcription of the coding sequence in an appropriate host cell or other expression system.

[0066] Associated: The term “associated” in the context of a MBM refers to a functional relationship between two or more polypeptide chains. In particular, the term “associated” means that two or more polypeptides are associated with one another, e.g., non-covalently through molecular interactions or covalently through one or more disulfide bridges or chemical cross-linkages, so as to produce a functional MBM in which ABM1, ABM2, etc. can bind their respective targets. Examples of associations that might be present in a MBM of the disclosure include (but are not limited to) associations between Fc regions in an Fc domain (homodimeric or, more preferably, heterodimeric as described in Section 7.4.1.5), associations between VH and VL regions in a Fab or Fv, and associations between CH1 and CL in a Fab.

[0067] ABM chain: Individual ABMs can exist as one (e.g., in the case of a scFv) polypeptide chain or form through the association of more than one polypeptide chains (e.g., in the case of a Fab). As used herein, the term “ABM chain” refers to all or a portion of an ABM that exists on a single polypeptide chain. The use of the term “ABM chain” is intended for convenience and descriptive purposes only and does not connote a particular configuration or method of production.

[0068] Host cell or recombinant host cell: The terms “host cell” or “recombinant host cell” refer to a cell that has been genetically-engineered, e.g., through introduction of a heterologous nucleic acid. It should be understood that such terms are intended to refer not only to the particular subject cell but to the progeny of such a cell. Because certain modifications can occur in succeeding generations due to either mutation or environmental influences, such progeny can or can not be identical to the parent cell, but are still included within the scope of the term “host cell” as used herein. A host cell can carry the heterologous nucleic acid transiently, e.g., on an extrachromosomal heterologous expression vector, or stably, e.g., through integration of the heterologous nucleic acid into the host cell genome. For purposes of expressing a MBM of the disclosure, a host cell is preferably a cell line of mammalian origin or mammalian-like characteristics, such as monkey kidney cells (COS, e.g., COS-1, COS-7), HEK293, baby hamster kidney (BHK, e.g., BHK21), Chinese hamster ovary (CHO), NSO, PerC6, BSC-1, human hepatocellular carcinoma cells (e.g., Hep G2), SP2/0, HeLa, Madin-Darby bovine kidney (MDBK), myeloma and lymphoma cells, or derivatives and/or engineered variants thereof. The engineered variants include, e.g., glycan profile modified and/or site-specific integration site derivatives.

[0069] Sequence identity: The term percent “identity,” in the context of two or more nucleic acids or polypeptide sequences, refers to two or more sequences that are the same. Two sequences are “substantially identical” if two sequences have a specified percentage of amino acid residues or nucleotides that are the same (e.g., 60% identity, optionally 70%, 71%. 72%. 73%, 74%, 75%, 76%, 77%, 78%, 79%, 80%, 81%, 82%, 83%, 84%, 85%, 86%, 87%, 88%, 89%, 90%, 91%, 92%, 93%, 94%, 95%, 96%, 97%, 98%, 99% identity over a specified region, or, when not specified, over the entire sequence), when compared and aligned for maximum correspondence over a comparison window, or designated region as measured using one of the following sequence comparison algorithms or by manual alignment and visual inspection. Optionally, the identity exists over a region that is at least about 50 nucleotides (or, in the case of a peptide or polypeptide, at least about 10 amino acids) in length, or more preferably over a region that is 100 to 500 or 1000 or more nucleotides (or 20, 50, 200 or more amino acids) in length.

[0070] For sequence comparison, typically one sequence acts as a reference sequence, to which test sequences are compared. When using a sequence comparison algorithm, test and reference sequences are entered into a computer, subsequence coordinates are designated, if necessary, and sequence algorithm program parameters are designated. Default program parameters can be used, or alternative parameters can be designated. The sequence comparison algorithm then calculates the percent sequence identities for the test sequences relative to the reference sequence, based on the program parameters. Methods of alignment of sequences for comparison are well known in the art. Optimal alignment of sequences for comparison can be conducted, e.g., by the local homology algorithm of Smith and Waterman, 1970, Adv. Appl. Math. 2:482c, by the homology alignment algorithm of Needleman and Wunsch, 1970, J. Mol. Biol. 48:443, by the search for similarity method of Pearson and Lipman, 1988, Proc. Nat'l. Acad. Sci. USA 85:2444, by computerized implementations of these algorithms (GAP, BESTFIT, FASTA, and TFASTA in the Wisconsin Genetics Software Package, Genetics Computer Group, 575 Science Dr., Madison, Wis.), or by manual alignment and visual inspection (see, e.g., Brent et al., 2003, Current Protocols in Molecular Biology).

[0071] Two examples of algorithms that are suitable for determining percent sequence identity and sequence similarity are the BLAST and BLAST 2.0 algorithms, which are described in Altschul et al., 1977, Nuc. Acids Res. 25:3389-3402; and Altschul et al., 1990, J. Mol. Biol. 215:403-410, respectively. Software for performing BLAST analyses is publicly available through the National Center for Biotechnology Information.

[0072] The percent identity between two amino acid sequences can also be determined using the algorithm of Meyers and Miller, 1988, Comput. Appl. Biosci. 4:11-17, which has been incorporated into the ALIGN program (version 2.0), using a PAM120 weight residue table, a gap length penalty of 12 and a gap penalty of 4. In addition, the percent identity between two amino acid sequences can be determined using the Needleman and Wunsch, 1970, J. Mol. Biol. 48:444-453) algorithm which has been incorporated into the GAP program in the GCG software package, using either a Blossom 62 matrix or a PAM250 matrix, and a gap weight of 16, 14, 12, 10, 8, 6, or 4 and a length weight of 1, 2, 3, 4, 5, or 6.

[0073] Conservative Sequence Modifications: The term “conservative sequence modifications” refers to amino acid modifications that do not significantly affect or alter the binding characteristics of a MBM or a component thereof (e.g., an ABM or an Fc region). Such conservative modifications include amino acid substitutions, additions and deletions. Modifications can be introduced into a MBM of the disclosure by standard techniques known in the art, such as site-directed mutagenesis and PCR-mediated mutagenesis. Conservative amino acid substitutions are ones in which the amino acid residue is replaced with an amino acid residue having a similar side chain. Families of amino acid residues having similar side chains have been defined in the art. These families include amino acids with basic side chains (e.g., lysine, arginine, histidine), acidic side chains (e.g., aspartic acid, glutamic acid), uncharged polar side chains (e.g., glycine, asparagine, glutamine, serine, threonine, tyrosine, cysteine, tryptophan), nonpolar side chains (e.g., alanine, valine, leucine, isoleucine, proline, phenylalanine, methionine), beta-branched side chains (e.g., threonine, valine, isoleucine) and aromatic side chains (e.g., tyrosine, phenylalanine, tryptophan, histidine). Thus, one or more amino acid residues within a MBM of the disclosure can be replaced with other amino acid residues from the same side chain family and the altered MBM can be tested for, e.g., binding to target molecules and/or effective heterodimerization and/or effector function.

[0074] Mutation or modification: The terms “mutation” and “modification” in the context of a polypeptide as used herein can include substitution, addition or deletion of one or more amino acids.

[0075] Antibody Numbering Systems: In the present specification, the references to numbered amino acid residues in antibody domains are based on the EU numbering system unless otherwise specified. This system was originally devised by Edelman et al., 1969, Proc. Nat'l Acad. Sci. USA 63:78-85 and is described in detail in Kabat et al., 1991, in Sequences of Proteins of Immunological Interest, US Department of Health and Human Services, NIH, USA.

[0076] dsFv: The term “dsFv” refers to disulfide-stabilized Fv fragments. In a dsFv, a VH and VL are connected by an interdomain disulfide bond. To generate such molecules, one amino acid each in the framework region of in VH and VL are mutated to a cysteine, which in turn form a stable interchain disulfide bond. Typically, position 44 in the VH and position 100 in the VL are mutated to cysteines. See Brinkmann, 2010, Antibody Engineering 181-189, D01:10.1007/978-3-642-01147-4_14. The term dsFv encompasses both what is known in the art a dsFv (a molecule in which the VH and VL are connected by an interchain disulfide bond but not a linker peptide) or scdsFv (a molecule in which the VH and VL are connected by a linker as well as an interchain disulfide bond).

[0077] Tandem of VH Domains: The term “a tandem of VH domains (or VHs)” as used herein refers to a string of VH domains, consisting of multiple numbers of identical VH domains of an antibody. Each of the VH domains, except the last one at the end of the tandem, has its C-terminus connected to the N-terminus of another VH domain with or without a linker. A tandem has at least 2 VH domains, and in particular embodiments of the MBMs of the disclosure has 3, 4, 5, 6, 7, 8, 9, or 10 VH domains. The tandem of VH can be produced by joining the encoding nucleic acids of each VH domain in a desired order using recombinant methods with or without a linker (e.g., as described in Section 7.4.3) that enables them to be made as a single polypeptide chain. The N-terminus of the first VH domain in the tandem is defined as the N-terminus of the tandem, while the C-terminus of the last VH domain in the tandem is defined as the C-terminus of the tandem.

[0078] Tandem of VL Domains: The term “a tandem of VL domains (or VLs)” as used herein refers to a string of VL domains, consisting of multiple numbers of identical VL domains of an antibody. Each of the VL domains, except the last one at the end of the tandem, has its C-terminus connected to the N-terminus of another VL with or without a linker. A tandem has at least 2 VL domains, and in particular embodiments of the MBMs of the disclosure has 3, 4, 5, 6, 7, 8, 9, or 10 VL domains. The tandem of VL can be produced by joining the encoding nucleic acids of each VL domain in a desired order using recombinant methods with or without a linker (e.g., as described in Section 7.4.3) that enables them to be made as a single polypeptide chain. The N-terminus of the first VL domain in the tandem is defined as the N-terminus of the tandem, while the C-terminus of the last VL domain in the tandem is defined as the C-terminus of the tandem.

[0079] Monovalent: The term “monovalent” as used herein in the context of an antigen-binding molecule refers to an antigen-binding molecule that has a single antigen-binding domain.

[0080] Bivalent: The term “bivalent” as used herein in the context of an antigen-binding molecule refers to a MBM that has two antigen-binding domains, wherein one antigen-binding domains is CD3. The antigen-binding domains can be the same or different. Accordingly, a bivalent antigen-binding molecule can be monospecific or bispecific. An example of a bivalent MBM of the disclosure is shown schematically in FIG. 3C.

[0081] Trivalent: The term “trivalent” as used herein in the context of an antigen-binding molecule refers to an antigen-binding molecule that has three antigen-binding domains. Trivalent MBMs specifically bind to CD3, TAA and another antigen. Trivalent MBMs of the disclosure have at least three antigen-binding domains that each bind to a different antigen. An example of a trivalent MBM of the disclosure is shown schematically in FIG. 3D.

[0082] Tetravalent: The term “tetravalent” as used herein in the context of a MBM refers to an antigen-binding molecule that has four antigen-binding domains. The MBMs of the disclosure are tetravalent and specifically bind to CD3, a TAA and at least one other antigen. The tetravalent MBMs of the disclosure generally have two antigen-binding domains that bind to the same antigen (preferably the TAA) and at least one antigen-binding domain that binds CD3. An example of a tetravalent MBM of the disclosure is shown schematically in FIG. 3E.

[0083] Pentavalent: The term “pentavalent” as used herein in the context of a MBM refers to an antigen-binding molecule that has five antigen-binding domains. The MBMs of the disclosure are pentavalent and specifically bind to CD3, a TAA and three other antigens. Accordingly, the pentavalent MBMs of the disclosure generally have either (a) two pairs of antigen-binding domains that each bind to the same antigen and a single antigen-binding domain that binds to the third antigen or (b) three antigen-binding domains that bind to the same antigen and two antigen-binding domains that each bind to a separate antigen.

[0084] Hexavalent: The term “hexavalent” as used herein in the context of a MBM refers to an antigen-binding molecule that has six antigen-binding domains. The MBMs of the disclosure specifically bind to CD3, a TAA and at least one other antigen. The hexavalent MBMs of the disclosure generally have three pairs of antigen-binding domains that each bind to the same antigen, although different configurations (e.g., three antigen-binding domains that bind to the TAA, and at least one antigen-binding domain that binds to CD3, or three antigen-binding domains that bind to the TAA, and at least two antigen-binding domains that bind to CD3) are within the scope of the disclosure.

[0085] Specifically (or selectively) binds: The term “specifically (or selectively) binds” to an antigen or an epitope refers to a binding reaction that is determinative of the presence of a cognate antigen or an epitope in a heterogeneous population of proteins and other biologics. The binding reaction can be but need not be mediated by an antibody or antibody fragment, but can also be mediated by, for example, any type of ABM described in Section 7.3, such as a ligand, a DARPin, etc. An ABM of the disclosure typically also has a dissociation rate constant (KD) (koff/kon) of less than 5×10⁻²M, less than 10⁻²M, less than 5×10⁻³M, less than 10⁻³M, less than 5×10⁻⁴M, less than 10⁻⁴M, less than 5×10⁻⁵M, less than 10⁻⁵M, less than 5×10⁻⁶M, less than 10⁻⁶M, less than 5×10⁻⁷M, less than 10⁻⁷M, less than 5×10⁻⁸M, less than 10⁻⁸M, less than 5×10⁻⁹M, or less than 10⁻⁹M, and binds to the target antigen with an affinity that is at least two-fold greater than its affinity for binding to a non-specific antigen (e.g., HSA). The term “specifically binds” does not exclude cross-species reactivity. For example, an antigen-binding module (e.g., an antigen-binding fragment of an antibody) that “specifically binds” to an antigen from one species can also “specifically bind” to that antigen in one or more other species. Thus, such cross-species reactivity does not itself alter the classification of an antigen-binding module as a “specific” binder. In certain embodiments, an antigen-binding module of the disclosure (e.g., ABM1, ABM2, etc.,) that specifically binds to a human antigen has cross-species reactivity with one or more non-human mammalian species, e.g., a primate species (including but not limited to one or more of Macaca fascicularis, Macaca mulatta, and Macaca nemestrina) or a rodent species, e.g., Mus musculus. In other embodiments, the antigen-binding module of the disclosure (e.g., ABM1, ABM2, etc.,) does not have cross-species reactivity.

[0086] Monoclonal Antibody: The term “monoclonal antibody” as used herein refers to polypeptides, including antibodies, antibody fragments, molecules (including MBMs), etc. that are derived from the same genetic source.

[0087] Humanized: The term “humanized” forms of non-human (e.g., murine) antibodies are chimeric antibodies that contain minimal sequence derived from non-human immunoglobulin. For the most part, humanized antibodies are human immunoglobulins (recipient antibody) in which residues from a hypervariable region of the recipient are replaced by residues from a hypervariable region of a non-human species (donor antibody) such as mouse, rat, rabbit or non-human primate having the desired specificity, affinity, and capacity. In some instances, framework region (FR) residues of the human immunoglobulin are replaced by corresponding non-human residues. Furthermore, humanized antibodies can comprise residues that are not found in the recipient antibody or in the donor antibody. These modifications are made to further refine antibody performance. In general, the humanized antibody will comprise substantially all of at least one, and typically two, variable domains, in which all or substantially all of the hypervariable loops correspond to those of a non-human immunoglobulin and all or substantially all of the FRs are those of a human immunoglobulin lo sequence. The humanized antibody optionally will also comprise at least a portion of an immunoglobulin constant region (Fc), typically that of a human immunoglobulin. For further details, see Jones et al., 1986, Nature 321:522-525; Riechmann et al., 1988, Nature 332:323-329; and Presta, 1992, Curr. Op. Struct. Biol. 2:593-596. See also the following review articles and references cited therein: Vaswani and Hamilton, 1998, Ann. Allergy, Asthma & Immunol. 1:105-115; Harris, 1995, Biochem. Soc. Transactions 23:1035-1038; Hurle and Gross, 1994, Curr. Op. Biotech. 5:428-433.

[0088] Human Antibody: The term “human antibody” as used herein includes antibodies having variable regions in which both the framework and CDR regions are derived from sequences of human origin. Furthermore, if the antibody contains a constant region, the constant region also is derived from such human sequences, e.g., human germline sequences, or mutated versions of human germline sequences or antibody containing consensus framework sequences derived from human framework sequences analysis, for example, as described in Knappik et al., 2000, J Mol Biol 296, 57-86. The structures and locations of immunoglobulin variable domains, e.g., CDRs, can be defined using well known numbering schemes, e.g., the Kabat numbering scheme, the Chothia numbering scheme, or a combination of Kabat and Chothia (see, e.g., Lazikani et al., 1997, J. Mol. Bio. 273:927 948; Kabat et al., 1991, Sequences of Proteins of Immunological Interest, 5th edit., NIH Publication no. 91-3242 U.S. Department of Health and Human Services; Chothia et al., 1987, J. Mol. Biol. 196:901-917; Chothia et al., 1989, Nature 342:877-883).

[0089] Human antibodies can include amino acid residues not encoded by human sequences (e.g., mutations introduced by random or site-specific mutagenesis in vitro or by somatic mutation in vivo, or a conservative substitution to promote stability or manufacturing). However, the term “human antibody”, as used herein, is not intended to include antibodies in which CDR sequences derived from the germline of another mammalian species, such as a mouse, have been grafted onto human framework sequences.

[0090] Chimeric Antibody: The term “chimeric antibody” (or antigen-binding fragment thereof) is an antibody molecule (or antigen-binding fragment thereof) in which (a) the constant region, or a portion thereof, is altered, replaced or exchanged so that the antigen-binding site (variable region) is linked to a constant region of a different or altered class, effector function and/or species, or an entirely different molecule which confers new properties to the chimeric antibody, e.g., an enzyme, toxin, hormone, growth factor, drug, etc.; or (b) the variable region, or a portion thereof, is altered, replaced or exchanged with a variable region having a different or altered antigen specificity. For example, a mouse antibody can be modified by replacing its constant region with the constant region from a human immunoglobulin. Due to the replacement with a human constant region, the chimeric antibody can retain its specificity in recognizing the antigen while having reduced antigenicity in human as compared to the original mouse antibody.

[0091] Effector Function: The term “effector function” refers to an activity of an antibody molecule that is mediated by binding through a domain of the antibody other than the antigen-binding domain, usually mediated by binding of effector molecules. Effector function includes complement-mediated effector function, which is mediated by, for example, binding of the C1 component of the complement to the antibody. Activation of complement is important in the opsonization and lysis of cell pathogens. The activation of complement also stimulates the inflammatory response and can also be involved in autoimmune hypersensitivity. Effector function also includes Fc receptor (FcR)-mediated effector function, which can be triggered upon binding of the constant domain of an antibody to an Fc receptor (FcR). Binding of antibody to Fc receptors on cell surfaces triggers a number of important and diverse biological responses including engulfment and destruction of antibody-coated particles, clearance of immune complexes, lysis of antibody-coated target cells by killer cells (called antibody-dependent cell-mediated cytotoxicity, or ADCC), release of inflammatory mediators, placental transfer and control of immunoglobulin production. An effector function of an antibody can be altered by altering, e.g., enhancing or reducing, the affinity of the antibody for an effector molecule such as an Fc receptor or a complement component. Binding affinity will generally be varied by modifying the effector molecule binding site, and in this case it is appropriate to locate the site of interest and modify at least part of the site in a suitable way. It is also envisaged that an alteration in the binding site on the antibody for the effector molecule need not alter significantly the overall binding affinity but can alter the geometry of the interaction rendering the effector mechanism ineffective as in non-productive binding. It is further envisaged that an effector function can also be altered by modifying a site not directly involved in effector molecule binding, but otherwise involved in performance of the effector function.

[0092] Recognize: The term “recognize” as used herein refers to an ABM that finds and interacts (e.g., binds) with its epitope.

[0093] Epitope: An epitope, or antigenic determinant, is a portion of an antigen recognized by an antibody or other antigen-binding domain as described herein. An epitope can be linear or conformational.

[0094] Nucleic Acid: The term “nucleic acid” is used herein interchangeably with the term “polynucleotide” and refers to deoxyribonucleotides or ribonucleotides and polymers thereof in either single- or double-stranded form. The term encompasses nucleic acids containing known nucleotide analogs or modified backbone residues or linkages, which are synthetic, naturally occurring, and non-naturally occurring, which have similar binding properties as the reference nucleic acid, and which are metabolized in a manner similar to the reference nucleotides. Examples of such analogs include, without limitation, phosphorothioates, phosphoramidates, methyl phosphonates, chiral-methyl phosphonates, 2-O-methyl ribonucleotides, peptide-nucleic acids (PNAs).

[0095] Unless otherwise indicated, a particular nucleic acid sequence also implicitly encompasses conservatively modified variants thereof (e.g., degenerate codon substitutions) and complementary sequences, as well as the sequence explicitly indicated. Specifically, as detailed below, degenerate codon substitutions can be achieved by generating sequences in which the third position of one or more selected (or all) codons is substituted with mixed-base and/or deoxyinosine residues (Batzer et al., (1991) Nucleic Acid Res. 19:5081; Ohtsuka et al., (1985) J. Biol. Chem. 260:2605-2608; and Rossolini et al., (1994) Mol. Cell. Probes 8:91-98).

[0096] Vector: The term “vector” is intended to refer to a polynucleotide molecule capable of transporting another polynucleotide to which it has been linked. One type of vector is a “plasmid”, which refers to a circular double stranded DNA loop into which additional DNA segments can be ligated. Another type of vector is a viral vector, wherein additional DNA segments can be ligated into the viral genome. Certain vectors are capable of autonomous replication in a host cell into which they are introduced (e.g., bacterial vectors having a bacterial origin of replication and episomal mammalian vectors). Other vectors (e.g., non-episomal mammalian vectors) can be integrated into the genome of a host cell upon introduction into the host cell, and thereby are replicated along with the host genome. Moreover, certain vectors are capable of directing the expression of genes to which they are operably linked. Such vectors are referred to herein as “recombinant expression vectors” (or simply, “expression vectors”). In general, expression vectors of utility in recombinant DNA techniques are often in the form of plasmids. In the present specification, “plasmid” and “vector” can be used interchangeably as the plasmid is the most commonly used form of vector. However, the disclosure is intended to include such other forms of expression vectors, such as viral vectors (e.g., replication defective retroviruses, adenoviruses and adeno-associated viruses), which serve equivalent functions.

[0097] Binding Sequences: In reference to the Tables (including subparts thereof), the term “binding sequences” means an ABM having a full set of CDRs, a VH-VL pair, or an scFv set forth in that table.

[0098] VH-VL or VH-VL Pair: In reference to a VH-VL pair, whether on the same polypeptide chain or on different polypeptide chains, the terms “VH-VL” and “VH-VL pair” are used for convenience and are not intended to convey any particular orientation, unless the context dictates otherwise. Thus, a scFv comprising a “VH-VL” or “VH-VL pair” can have the VH and VL domains in any orientation, for example the VH N-terminal to the VL or the VL N-terminal to the VH.

[0099] Polypeptide and Protein: The terms “polypeptide” and “protein” are used interchangeably herein to refer to a polymer of amino acid residues. The phrases also apply to amino acid polymers in which one or more amino acid residue is an artificial chemical mimetic of a corresponding naturally occurring amino acid, as well as to naturally occurring amino acid polymers and non-naturally occurring amino acid polymer. Unless otherwise indicated, a particular polypeptide sequence also implicitly encompasses conservatively modified variants thereof.

[0100] Subject: The term “subject” includes human and non-human animals. Non-human animals include all vertebrates, e.g., mammals and non-mammals, such as non-human primates, sheep, dog, cow, chickens, amphibians, and reptiles. Except when noted, the terms “patient” or “subject” are used herein interchangeably.

[0101] Cancer: The term “cancer” refers to a disease characterized by the uncontrolled (and often rapid) growth of aberrant cells. Cancer cells can spread locally or through the bloodstream and lymphatic system to other parts of the body. Examples of various cancers are described herein and include but are not limited to, breast cancer, prostate cancer, ovarian cancer, cervical cancer, skin cancer, pancreatic cancer, colorectal cancer, renal cancer, liver cancer, brain cancer, adrenal gland cancer, autonomic ganglial cancer, binary tract cancer, bone cancer, endometrial cancer, eye cancer, fallopian tube cancer, genital tract cancers, large intestinal cancer, cancer of the meninges, oesophageal cancer, peritoneial cancer, pituitary cancer, penile cancer, placental cancer, pleura cancer, salivary gland cancer, small intestinal cancer, stomach cancer, testicular cancer, thymus cancer, thyroid cancer, upper aerodigestive cancers, urinary tract cancer, vaginal cancer, vulva cancer, lymphoma, leukemia, lung cancer and the like, e.g., any TAA-positive cancers of any of the foregoing types.

[0102] Tumor: The term “tumor” is used interchangeably with the term “cancer” herein, e.g., both terms encompass solid and liquid, e.g., diffuse or circulating, tumors. As used herein, the term “cancer” or “tumor” includes premalignant, as well as malignant cancers and tumors.

[0103] Tumor-Associated Antigen: The term “tumor-associated antigen” or “TAA” refers to a molecule (typically a protein, carbohydrate, lipid or some combination thereof) that is expressed on the surface of a cancer cell, either entirely or as a fragment (e.g., MHC/peptide), and which is useful for the preferential targeting of a pharmacological agent to the cancer cell. In some embodiments, a TAA is a marker expressed by both normal cells and cancer cells, e.g., a lineage marker, e.g., CD19 on B cells. In some embodiments, a TAA is a cell surface molecule that is overexpressed in a cancer cell in comparison to a normal cell, for instance, 1-fold over expression, 2-fold overexpression, 3-fold overexpression or more in comparison to a normal cell. In some embodiments, a TAA is a cell surface molecule that is inappropriately synthesized in the cancer cell, for instance, a molecule that contains deletions, additions or mutations in comparison to the molecule expressed on a normal cell. In some embodiments, a TAA will be expressed exclusively on the cell surface of a cancer cell, entirely or as a fragment (e.g., MHC/peptide), and not synthesized or expressed on the surface of a normal cell. Accordingly, the term “TAA” encompasses antigens that are specific to cancer cells, sometimes known in the art as tumor-specific antigens (“TSAs”).

[0104] Treat, Treatment, Treating: As used herein, the terms “treat”, “treatment” and “treating” refer to the reduction or amelioration of the progression, severity and/or duration of a proliferative disorder, or the amelioration of one or more symptoms (preferably, one or more discernible symptoms) of a proliferative disorder resulting from the administration of one or more MBMs of the disclosure. In specific embodiments, the terms “treat”, “treatment” and “treating” refer to the amelioration of at least one measurable physical parameter of a proliferative disorder, such as growth of a tumor, not necessarily discernible by the patient. In other embodiments the terms “treat”, “treatment” and “treating” refer to the inhibition of the progression of a proliferative disorder, either physically by, e.g., stabilization of a discernible symptom, physiologically by, e.g., stabilization of a physical parameter, or both. In other embodiments, the terms “treat”, “treatment” and “treating” refer to the reduction or stabilization of tumor size or cancerous cell count.

### 7.2. CD3 Binding Molecules

[0105] In one aspect, the disclosure provides CD3 binding molecules, including monospecific and multispecific molecules that bind to human CD3. In some embodiments, the CD3 binding molecule is a monospecific binding molecule. For example, the monospecific binding molecule can be an antibody or an antigen-binding fragment thereof (e.g., an antibody fragment, an scFv, a dsFv, a Fv, a Fab, an scFab, a (Fab′)2, or a single domain antibody (SDAB). In other embodiments, the CD3 binding molecule is a multispecific (e.g., bispecific) CD3 binding molecule (e.g., a bispecific antibody).

[0106] In some embodiments, the CD3 binding molecules are chimeric or humanized monoclonal antibodies. Chimeric and/or humanized antibodies, can be engineered to minimize the immune response by a human patient to antibodies produced in non-human subjects or derived from the expression of non-human antibody genes. Chimeric antibodies comprise a non-human animal antibody variable region and a human antibody constant region. Such antibodies retain the epitope binding specificity of the original monoclonal antibody, but can be less immunogenic when administered to humans, and therefore more likely to be tolerated by the patient. For example, one or all (e.g., one, two, or three) of the variable regions of the light chain(s) and/or one or all (e.g., one, two, or three) of the variable regions the heavy chain(s) of a mouse antibody (e.g., a mouse monoclonal antibody) can each be joined to a human constant region, such as, without limitation an IgG1 human constant region. Chimeric monoclonal antibodies can be produced by known recombinant DNA techniques. For example, a gene encoding the constant region of a non-human antibody molecule can be substituted with a gene encoding a human constant region (see Robinson et al., PCT Patent Publication PCT/US86/02269; Akira, et al., European Patent Application 184,187; or Taniguchi, M., European Patent Application 171,496). In addition, other suitable techniques that can be used to generate chimeric antibodies are described, for example, in U.S. Pat. Nos. 4,816,567; 4,978,775; 4,975,369; and 4,816,397.

[0107] Chimeric or humanized antibodies and antigen binding fragments thereof of the present disclosure can be prepared based on the sequence of a murine monoclonal antibody. DNA encoding the heavy and light chain immunoglobulins can be obtained from a murine hybridoma of interest and engineered to contain non-murine (e.g., human) immunoglobulin sequences using standard molecular biology techniques. For example, to create a chimeric antibody, the murine variable regions can be linked to human constant regions using known methods (see e.g., U.S. Pat. No. 4,816,567 to Cabilly et al.). To create a humanized antibody, the murine CDR regions can be inserted into a human framework using known methods. See e.g., U.S. Pat. No. 5,225,539 to Winter, and U.S. Pat. Nos. 5,530,101; 5,585,089; 5,693,762 and 6,180,370 to Queen et al.

[0108] A humanized antibody can be produced using a variety of known techniques, including but not limited to, CDR-grafting (see, e.g., European Patent No. EP 239,400; International Publication No. WO 91/09967; and U.S. Pat. Nos. 5,225,539, 5,530,101, and 5,585,089), veneering or resurfacing (see, e.g., European Patent Nos. EP 592,106 and EP 519,596; Padlan, 1991, Molecular Immunology, 28(4/5):489-498; Studnicka et al., 1994, Protein Engineering, 7(6):805-814; and Roguska et al., 1994, PNAS, 91:969-973), chain shuffling (see, e.g., U.S. Pat. No. 5,565,332), and techniques disclosed in, e.g., U.S. Patent Application Publication No. US2005/0042664, U.S. Patent Application Publication No. US2005/0048617, U.S. Pat. Nos. 6,407,213, 5,766,886, International Publication No. WO 9317105, Tan et al., J. Immunol., 169:1119-25 (2002), Caldas et al., Protein Eng., 13(5):353-60 (2000), Morea et al., Methods, 20(3):267-79 (2000), Baca et al., J. Biol. Chem., 272(16):10678-84 (1997), Roguska et al., Protein Eng., 9(10):895-904 (1996), Couto et al., Cancer Res., 55 (23 Supp):5973s-5977s (1995), Couto et al., Cancer Res., 55(8):1717-22 (1995), Sandhu J S, Gene, 150(2):409-10 (1994), and Pedersen et al., J. Mol. Biol., 235(3):959-73 (1994). Often, framework residues in the framework regions will be substituted with the corresponding residue from the CDR donor antibody to alter, for example improve, antigen binding. These framework substitutions, e.g., conservative substitutions are identified by known methods, e.g., by modeling of the interactions of the CDR and framework residues to identify framework residues important for antigen binding and sequence comparison to identify unusual framework residues at particular positions. (See, e.g., Queen et al., U.S. Pat. No. 5,585,089; and Riechmann et al., 1988, Nature, 332:323).

[0109] As provided herein, humanized antibodies or antibody fragments can comprise one or more CDRs from nonhuman immunoglobulin molecules and framework regions where the amino acid residues comprising the framework are derived completely or mostly from human germline. Multiple techniques for humanization of antibodies or antibody fragments are well-known and can essentially be performed following the method of Winter and co-workers (Jones et al., Nature, 321:522-525 (1986); Riechmann et al., Nature, 332:323-327 (1988); Verhoeyen et al., Science, 239:1534-1536 (1988)), by substituting rodent CDRs or CDR sequences for the corresponding sequences of a human antibody, i.e., CDR-grafting (EP 239,400; PCT Publication No. WO 91/09967; and U.S. Pat. Nos. 4,816,567; 6,331,415; 5,225,539; 5,530,101; 5,585,089; 6,548,640). In such humanized antibodies and antibody fragments, substantially less than an intact human variable domain has been substituted by the corresponding sequence from a nonhuman species. Humanized antibodies are often human antibodies in which some CDR residues and possibly some framework (FR) residues are substituted by residues from analogous sites in rodent antibodies. Humanization of antibodies and antibody fragments can also be achieved by veneering or resurfacing (EP 592,106; EP 519,596; Padlan, 1991, Molecular Immunology, 28(4/5):489-498; Studnicka et al., Protein Engineering, 7(6):805-814 (1994); and Roguska et al., PNAS, 91:969-973 (1994)) or chain shuffling (U.S. Pat. No. 5,565,332).

[0110] The choice of human variable domains, both light and heavy, to be used in making the humanized antibodies is to reduce antigenicity. According to the so-called “best-fit” method, the sequence of the variable domain of a rodent antibody is screened against the entire library of known human variable-domain sequences. The human sequence which is closest to that of the rodent is then accepted as the human framework (FR) for the humanized antibody (Sims et al., J. Immunol., 151:2296 (1993); Chothia et al., J. Mol. Biol., 196:901 (1987)). Another method uses a particular framework derived from the consensus sequence of all human antibodies of a particular subgroup of light or heavy chains. The same framework can be used for several different humanized antibodies (see, e.g., Nicholson et al. Mol. Immun. 34 (16-17): 1157-1165 (1997); Carter et al., Proc. Natl. Acad. Sci. USA, 89:4285 (1992); Presta et al., J. Immunol., 151:2623 (1993). In some embodiments, the framework region, e.g., all four framework regions, of the heavy chain variable region are derived from a VH4_4-59 germline sequence. In one embodiment, the framework region can comprise, one, two, three, four or five modifications, e.g., substitutions, e.g., conservative substitutions, e.g., from the amino acid at the corresponding murine sequence. In one embodiment, the framework region, e.g., all four framework regions of the light chain variable region are derived from a VK3_1.25 germline sequence. In one embodiment, the framework region can comprise, one, two, three, four or five modifications, e.g., substitutions, e.g., conservative substitutions, e.g., from the amino acid at the corresponding murine sequence.

[0111] In certain embodiments, the CD3 binding molecules comprise a heavy chain variable region from a particular germline heavy chain immunoglobulin gene and/or a light chain variable region from a particular germline light chain immunoglobulin gene. For example, such antibodies can comprise or consist of a human antibody comprising heavy or light chain variable regions that are “the product of” or “derived from” a particular germline sequence. A human antibody that is “the product of” or “derived from” a human germline immunoglobulin sequence can be identified as such by comparing the amino acid sequence of the human antibody to the amino acid sequences of human germline immunoglobulins and selecting the human germline immunoglobulin sequence that is closest in sequence (i.e., greatest % identity) to the sequence of the human antibody (using the methods outlined herein). A human antibody that is “the product of” or “derived from” a particular human germline immunoglobulin sequence can contain amino acid differences as compared to the germline sequence, due to, for example, naturally-occurring somatic mutations or intentional introduction of site-directed mutation. However, a humanized antibody typically is at least 90% identical in amino acids sequence to an amino acid sequence encoded by a human germline immunoglobulin gene and contains amino acid residues that identify the antibody as being derived from human sequences when compared to the germline immunoglobulin amino acid sequences of other species (e.g., murine germline sequences). In certain cases, a humanized antibody can be at least 95, 96, 97, 98 or 99%, or even at least 96%, 97%, 98%, or 99% identical in amino acid sequence to the amino acid sequence encoded by the germline immunoglobulin gene. Typically, a humanized antibody derived from a particular human germline sequence will display no more than 10-20 amino acid differences from the amino acid sequence encoded by the human germline immunoglobulin gene (prior to the introduction of any skew, pl and ablation variants herein; that is, the number of variants is generally low, prior to the introduction of the variants of the disclosure). In certain cases, the humanized antibody can display no more than 5, or even no more than 4, 3, 2, or 1 amino acid difference from the amino acid sequence encoded by the germline immunoglobulin gene (again, prior to the introduction of any skew, pl and ablation variants herein; that is, the number of variants is generally low, prior to the introduction of the variants of the disclosure).

[0112] In one embodiment, the parent antibody has been affinity matured. Structure-based methods can be employed for humanization and affinity maturation, for example as described in U.S. Ser. No. 11/004,590. Selection based methods can be employed to humanize and/or affinity mature antibody variable regions, including but not limited to methods described in Wu et al., 1999, J. Mol. Biol. 294:151-162; Baca et al., 1997, J. Biol. Chem. 272(16):10678-10684; Rosok et al., 1996, J. Biol. Chem. 271(37): 22611-22618; Rader et al., 1998, Proc. Natl. Acad. Sci. USA 95: 8910-8915; Krauss et al., 2003, Protein Engineering 16(10):753-759. Other humanization methods can involve the grafting of only parts of the CDRs, including but not limited to methods described in U.S. Ser. No. 09/810,510; Tan et al., 2002, J. Immunol. 169:1119-1125; De Pascalis et al., 2002, J. Immunol. 169:3076-3084.

[0113] In some embodiments, the CD3 binding molecule comprises an ABM which is a Fab. Fab domains can be produced by proteolytic cleavage of immunoglobulin molecules, using enzymes such as papain, or through recombinant expression. Fab domains typically comprise a CH1 domain attached to a VH domain which pairs with a CL domain attached to a VL domain. In a wild-type immunoglobulin, the VH domain is paired with the VL domain to constitute the Fv region, and the CH1 domain is paired with the CL domain to further stabilize the binding module. A disulfide bond between the two constant domains can further stabilize the Fab domain.

[0114] In some embodiments, the CD3 binding molecule comprises an ABM which is a scFab. In an embodiment, the antibody domains and the linker in the scFab fragment have one of the following orders in N-terminal to C-terminal direction: a) VH-CH1-linker-VL-CL, or b) VL-CL-linker-VH-CH1. In some cases, VL-CL-linker-VH-CH1 is used.

[0115] In another embodiment, the antibody domains and the linker in the scFab fragment have one of the following orders in N-terminal to C-terminal direction: a) VH-CL-linker-VL-CH1 or b) VL-CH1-linker-VH-CL.

[0116] Optionally in the scFab fragment, additionally to the natural disulfide bond between the CL-domain and the CH1 domain, also the antibody heavy chain variable domain (VH) and the antibody light chain variable domain (VL) are disulfide stabilized by introduction of a disulfide bond between the following positions: i) heavy chain variable domain position 44 to light chain variable domain position 100, ii) heavy chain variable domain position 105 to light chain variable domain position 43, or iii) heavy chain variable domain position 101 to light chain variable domain position 100 (numbering according to EU index of Kabat).

[0117] Such further disulfide stabilization of scFab fragments is achieved by the introduction of a disulfide bond between the variable domains VH and VL of the single chain Fab fragments. Techniques to introduce unnatural disulfide bridges for stabilization for a single chain Fv are described e.g. in WO 94/029350, Rajagopal et al., 1997, Prot. Engin. 10:1453-59; Kobayashi et al., 1998, Nuclear Medicine & Biology, 25:387-393; and Schmidt, et al., 1999, Oncogene 18:1711-1721. In one embodiment, the optional disulfide bond between the variable domains of the scFab fragments is between heavy chain variable domain position 44 and light chain variable domain position 100. In one embodiment, the optional disulfide bond between the variable domains of the scFab fragments is between heavy chain variable domain position 105 and light chain variable domain position 43 (numbering according to EU index of Kabat).

[0118] In some embodiments, the CD3 binding molecule comprises an ABM which is a scFv. Single chain Fv antibody fragments comprise the VH and VL domains of an antibody in a single polypeptide chain, are capable of being expressed as a single chain polypeptide, and retain the specificity of the intact antibody from which it is derived. Generally, the scFv polypeptide further comprises a polypeptide linker between the VH and VL domain that enables the scFv to form the desired structure for target binding. Examples of linkers suitable for connecting the VH and VL chains of an scFV are the ABM linkers identified in Section 7.4.3, for example any of the linkers designated L1 through L58.

[0119] Unless specified, as used herein an scFv can have the VL and VH variable regions in either order, e.g., with respect to the N-terminal and C-terminal ends of the polypeptide, the scFv can comprise VL-linker-VH or can comprise VH-linker-VL.

[0120] To create an scFv-encoding nucleic acid, the VH and VL-encoding DNA fragments are operably linked to another fragment encoding a linker, e.g., encoding any of the linkers described in Section 7.4.3 (such as the amino acid sequence (Gly4^{˜}Ser)3 (SEQ ID NO: 47)), such that the VH and VL sequences can be expressed as a contiguous single-chain protein, with the VL and VH regions joined by the flexible linker (see e.g., Bird et al., 1988, Science 242:423-426; Huston et al., 1988, Proc. Natl. Acad. Sci. USA 85:5879-5883; McCafferty et al., 1990, Nature 348:552-554).

[0121] CD3 binding molecules can also comprise an ABM which is a Fv, a dsFv, a (Fab′)2, a single domain antibody (SDAB), a VH or VL domain, or a camelid VHH domain (also called a nanobody).

[0122] CD3 binding molecules can comprise a single domain antibody composed of a single VH or VL domain which exhibits sufficient affinity to CD3. In an embodiment, the single domain antibody is a camelid VHH domain (see, e.g., Riechmann, 1999, Journal of Immunological Methods 231:25-38; WO 94/04678).

[0123] Tables 1A to 1J-2 (collectively “Table 1”) list the sequences of exemplary CD3 binding sequences that can be included in CD3 binding molecules.

TABLE 1A
Consensus Group No. C1 Heavy Chain and
Light Chain CDR Consensus Sequences

| | | | SEQ ID |
|---|---|---|---|
| CDR | Binder | Sequence | NO: |
| CDR-H1 | C1-1 | GFX₁FX₂KX₃GMX₄ | 628 |
| CDR-H1 | C1-2 | GFX₁FX₂KX₃G | 629 |
| CDR-H1 | C1-3 | KX₃GMX₄ | 630 |
| CDR-H1 | C1-4 | GFX₁FX₂KX₃ | 631 |
| CDR-H2 | C1-5 | X₅IYYDSSX₆MYYADTVKG | 632 |
| CDR-H2 | C1-6 | YYDSSX₆ | 633 |
| CDR-H2 | C1-7 | IYYDSSX₆M | 634 |
| CDR-H3 | C1-8 | X₅₅X₈X₉DLDFDX₁₀ | 635 |
| CDR-H3 | C1-9 | AX₇X₅₅X₈X₉DLDFDX₁₀ | 636 |
| CDR-H3 | C1-10 | AALNSEYD | 637 |
| CDR-H3 | C1-11 | LNSEYD | 638 |
| CDR-L1 | C1-12 | RX₁₁SQSX₁₂X₁₃X₁₄SX₁₅X₁₆TTYFN | 639 |
| CDR-L1 | C1-13 | QSX₁₂X₁₃X₁₄SX₁₅TTY | 640 |
| CDR-L1 | C1-14 | SQSX₁₂X₁₃X₁₄SX₁₅X₁₆TTY | 641 |
| CDR-L1 | C1-15 | RX₁₁SQSX₁₂X₁₃X₁₄SX₁₅X₁₆ | 642 |
| CDR-L1 | C1-16 | SQSX₁₂X₁₃X₁₄S | 643 |
| CDR-L1 | C1-17 | QSX₁₂X₁₃X₁₄S | 644 |
| CDR-L2 | C1-18 | X₁₇X₁₈SX₁₉X₂₀X₂₁X₂₂ | 645 |
| CDR-L2 | C1-19 | X₁₇X₁₈ | 646 |
| CDR-L3 | C1-20 | LQX₂₃X₂₄X₂₅X₂₆PX₂₇T | 647 |
| CDR-L3 | C1-21 | X₂₃X₂₄X₂₅X₂₈PX₂₇ | 648 |
| CDR-L3 | C1-22 | LQX₂₃X₂₄X₂₅ | 649 |
| CDR-L3 | C1-23 | LQX₂₃X₂₄X₂₅X₂₆PX₂₇ | 650 |

X₁ is T or A;
X₂ is S or R;
X₃ is N, Y, or Q;
X₄ is H or S;
X₅ is M or L;
X₆ is K or R;
X₇ is S or K;
X₅₅ is F, Y, or S;
X₈ is W, Y, S, or T;
X₉ is W, Y, S, or T;
X₁₀ is H or Y;
X₁₁ is S or G;
X₁₂ is I or L;
X₁₃ is V or G;
X₁₄ is R or N;
X₁₅ is D, E, or L;
X₁₆ is G, N, or E;
X₁₇ is R or S;
X₁₈ is V or T;
X₁₉ is N or T;
X₂₀ is R or L;
X₂₁ is F or E;
X₂₂ is S or Y;
X₂₃ is S or Y;
X₂₄ is S or A;
X₂₅ is H or T;
X₂₆ is F or Y;
X₂₇ is W or Y

TABLE 1B
Consensus Group No. C2 Heavy Chain and
Light Chain CDR Consensus Sequences

| | | | SEQ ID |
|---|---|---|---|
| CDR | Binder | Sequence | NO: |
| CDR-H1 | C2-1 | GFSLTTYNX₂₈H | 651 |
| CDR-H1 | C2-2 | GFSLTTYN | 652 |
| CDR-H1 | C2-3 | TYNX₂₈H | 653 |
| CDR-H1 | C2-4 | GFSLTTY | 654 |
| CDR-H2 | C2-5 | RMRYSGDTSX₂₉X₃₀X₃₁ALX₃₂S | 655 |
| CDR-H2 | C2-6 | RYSGD | 656 |
| CDR-H2 | C2-7 | MRYSGDT | 657 |
| CDR-H3 | C2-8 | DPMYIPX₃₅YX₃₆YGVMNA | 658 |
| CDR-H3 | C2-9 | X₃₃X₃₄DPMYIPX₃₅YX₃₆YGVMNA | 659 |
| CDR-L1 | C2-10 | KX₃₇SQNIX₃₈X₃₉YLN | 660 |
| CDR-L1 | C2-11 | SQNIX₃₈X₃₉Y | 661 |
| CDR-L1 | C2-12 | QNIX₃₈X₃₉Y | 662 |
| CDR-L2 | C2-13 | NTX₄₀X₄₁LX₄₂AGVP | 663 |
| CDR-L2 | C2-14 | NTX₄₀X₄₁LX₄₂A | 664 |
| CDR-L2 | C2-15 | NTX₄₀ | 665 |
| CDR-L3 | C2-16 | LQHRSX₄₃YT | 666 |
| CDR-L3 | C2-17 | HRSX₄₃Y | 667 |

X₂₈ is V or I;
X₂₉ is F or Y;
X₃₀ is N or S;
X₃₁ is A or S;
X₃₂ is T or K;
X₃₃ is T or A;
X₃₄ is S or R;
X₃₅ is N or G;
X₃₆ is S or A;
X₃₇ is A, T, or S;
X₃₈ is N or D;
X₃₉ is N or K;
X₄₀ is D or N;
X₄₁ is H or N;
X₄₂ is Q or E;
X₄₃ is R, S, or G

TABLE 1C
Consensus Group No. C3 Heavy Chain and Light
Chain CDR Consensus Sequences

| | | | SEQ ID |
|---|---|---|---|
| CDR | Binder | Sequence | NO: |
| CDR-H1 | C3-1 | GYTFTSYYIY | 668 |
| CDR-H1 | C3-2 | GYTFTSYY | 669 |
| CDR-H1 | C3-3 | SYYIY | 670 |
| CDR-H1 | C3-4 | GYTFTSY | 671 |
| CDR-H2 | C3-5 | YIYPX₄₄X₄₅X₄₆X₄₇IYYSEX₄₈FKG | 672 |
| CDR-H2 | C3-6 | YPX₄₄X₄₅X₄₆X₄₇ | 673 |
| CDR-H2 | C3-7 | IYPX₄₄X₄₅X₄₆X₄₇I | 674 |
| CDR-H3 | C3-8 | X₄₉RPX₅₀TMMAPLX₅₁X₅₂ | 675 |
| CDR-H3 | C3-9 | PX₅₀TMMAPLX₅₁X₅₂ | 676 |
| CDR-L1 | C3-10 | RSSQSLX₅₃YSX₅₄GNTYLH | 677 |
| CDR-L1 | C3-11 | SQSLX₅₃YSX₅₄GNTY | 678 |
| CDR-L1 | C3-12 | QSLX₅₃YSX₅₄GNTY | 679 |
| CDR-L2 | C3-13 | RVSNRFS | 680 |
| CDR-L2 | C3-14 | RVS | 681 |
| CDR-L3 | C3-15 | FQSTHLPYT | 682 |
| CDR-L3 | C3-16 | STHLPY | 683 |

X₄₄ is G or A; X₄₅ is H or N; X₄₆ is D or G; X₄₇ is A or G; X₄₈ is N or K; X₄₉ iS V or A; X₅₀ is N or V; X₅₁ is A or V; X₅₂ is Y or F; X₅₃ is I or V; X₅₄ is I or H

TABLE 1D-1
CD3 Binders - Heavy Chain CDR sequences according to Kabat numbering scheme

| | | SEQ ID | | SEQ ID | | SEQ ID |
|---|---|---|---|---|---|---|
| Binder | CDR-H1 | NO: | CDR-H2 | NO: | CDR-H3 | NO: |
| NOV292 | KNGMH | 136 | MIYYDSSKMYY | 137 | FVWVDLDFDH | 138 |
| | | | ADTVKG | | | |
| NOV123 | SYYIY | 168 | YIYPGHDAIYYS | 169 | PNTMMAPLA | 170 |
| | | | ENFKG | | Y | |
| Sp10b | SYYIY | 168 | YIYPGHDAIYYS | 166 | PNTMMAPLA | 167 |
| | | | ENFKG | | Y | |
| NOV453 | TYNVH | 200 | RMRYSGDTSF | 201 | DPMYIPNYSY | 202 |
| | | | NAALTS | | GVMNA | |
| NOV229 | TYNVH | 232 | RMRYSGDTSF | 233 | DPMYIPNYSY | 234 |
| | | | NAALTS | | GVMNA | |
| NOV110 | SYYIY | 264 | YIYPANGGIYYS | 265 | PVTMMAPLV | 266 |
| | | | EKFKG | | F | |
| NOV832 | SYYIY | 296 | YIYPANGGIYYS | 297 | PVTMMAPLV | 298 |
| | | | EKFKG | | F | |
| N0V589 | KNGMH | 328 | MIYYDSSRMYY | 329 | FVWVDLDFDY | 330 |
| | | | ADTVKG | | | |
| N0V580 | TYNIH | 360 | RMRYSGDTSY | 361 | DPMYIPGYSY | 362 |
| | | | SSALKS | | GVMNA | |
| NOV567 | KYGMS | 392 | LIYYDSSKMNY | 393 | LNSEYD | 394 |
| | | | ADTVKG | | | |
| NOV221 | TYNIH | 424 | RMRYSGDTSY | 425 | DPMYIPGYSY | 426 |
| | | | SSALKS | | GVMNA | |
| CD3_sp11a_bkm1 | KNGMH | 136 | MIYYDSSKMYY | 134 | FVWVDLDFDH | 135 |
| | | | ADTVKG | | | |
| CD3_SP11a_bkm2 | KNGMH | 136 | MIYYDSSKMYY | 134 | FVWVDLDFDH | 135 |
| | | | ADTVKG | | | |
| CD3_sp11a_hz0 | KNGMH | 136 | MIYYDSSKMYY | 134 | FVWVDLDFDH | 135 |
| | | | ADTVKG | | | |
| CD3_SP11A_HZ1 | KNGMH | 136 | MIYYDSSKMYY | 134 | FVWVDLDFDH | 135 |
| | | | ADTVKG | | | |
| CD3_sp11a_ | KQGMH | 483 | MIYYDSSKMYY | 134 | FVWVDLDFDH | 135 |
| sansPTM_hz1 | | | ADTVKG | | | |
| CD3_sp11a_ | KQGMH | 483 | MIYYDSSKMYY | 134 | FVWVDLDFDH | 135 |
| sansPTM_rat | | | ADTVKG | | | |
| CD3_sp11a_VHVL_YY | KNGMH | 136 | MIYYDSSKMYY | 134 | FYYDLDFDH | 478 |
| | | | ADTVKG | | | |
| CD3_SP11A_VHVL_SS | KNGMH | 136 | MIYYDSSKMYY | 134 | FSSDLDFDH | 472 |
| | | | ADTVKG | | | |
| CD3_SP11A_VHVL_ | KNGMH | 136 | MIYYDSSKMYY | 134 | FWSDLDFDH | 476 |
| WS | | | ADTVKG | | | |
| CD3_sp11a_VHVLS_TW | KNGMH | 136 | MIYYDSSKMYY | 134 | FSVVDLDFDH | 473 |
| | | | ADTVKG | | | |
| CD3 SP11A_VHVL_T | KNGMH | 136 | MIYYDSSKMYY | 134 | FTTDLDFDH | 474 |
| T | | | ADTVKG | | | |
| CD3 SP11A_VHVL_T | KNGMH | 136 | MIYYDSSKMYY | 134 | FTVVDLDFDH | 475 |
| W | | | ADTVKG | | | |
| CD3_SP11A_VHVL_ | KNGMH | 136 | MIYYDSSKMYY | 134 | FVVTDLDFDH | 477 |
| WT | | | ADTVKG | | | |
| CD3_SP11A | KNGMH | 136 | MIYYDSSKMYY | 134 | FVWVDLDFDH | 135 |
| VH3_VLK_3 | | | ADTVKG | | | |
| CD3_sp11a_VH1_VK | KNQMH | 482 | MIYYDSSKMYY | 134 | FVWVDLDFDH | 135 |
| 2 | | | ADTVKG | | | |
| CD3_SP11A_VH3_VL | KNGMH | 136 | MIYYDSSKMYY | 134 | FVWVDLDFDH | 135 |
| K1 | | | ADTVKG | | | |
| CD3_SP11A_VH5_VK | KQGMH | 483 | MIYYDSSKMYY | 134 | FVWVDLDFDH | 135 |
| 2 | | | ADTVKG | | | |
| CD3_sp9aFW1_VL_V | TYNVH | 200 | RMRYSGDTSF | 198 | DPMYIPNYAY | 471 |
| H_S56G | | | NAALTS | | GVMNA | |
| CD3_SP9AFW4_VL_ | TYNVH | 200 | RMRYSGDTSF | 198 | DPMYIPNYAY | 471 |
| VH_S56G | | | NAALTS | | GVMNA | |
| CD3_sp9aFW1_VLVH | TYNVH | 200 | RMRYSGDTSF | 198 | DPMYIPNYAY | 471 |
| | | | NAALTS | | GVMNA | |
| CD3_sp9aFW4_VLVH | TYNVH | 200 | RMRYSGDTSF | 198 | DPMYIPNYAY | 471 |
| | | | NAALTS | | GVMNA | |
| CD3_sp9arabtor_VHVL | TYNVH | 200 | RMRYSGDTSF | 198 | DPMYIPNYAY | 471 |
| | | | NAALTS | | GVMNA | |
| CD3_sp9arabtor_VLVH | TYNVH | 200 | RMRYSGDTSF | 198 | DPMYIPNYAY | 471 |
| | | | NAALTS | | GVMNA | |
| CD3_sp11a VHVLY | KNGMH | 136 | MIYYDSSKMYY | 134 | FYYDLDFDH | 478 |
| Y_SANSPTM | | | ADTVKG | | | |
| CD3_sp11a_VHVL_Y | KNGMH | 136 | MIYYDSSKMYY | 134 | YYYDLDFDH | 627 |
| Y_SANSPTM_Y | | | ADTVKG | | | |
| CD3_sp11a_VHVL_Y | KNGMH | 136 | MIYYDSSKMYY | 134 | SYYDLDFDH | 619 |
| Y_SANSPTM_S | | | ADTVKG | | | |
| CD3_sp11a_VHVL_Y | KNGMH | 136 | MIYYDSSKMYY | 134 | YYYDLDFDH | 627 |
| Y_Y | | | ADTVKG | | | |
| CD3_sp11a_VHVL_Y | KNGMH | 136 | MIYYDSSKMYY | 134 | SYYDLDFDH | 619 |
| Y_s | | | ADTVKG | | | |
| CD3_sp11a_VHVL_S | KNGMH | 136 | MIYYDSSKMYY | 134 | FSSDLDFDH | 472 |
| S_SANSPTM | | | ADTVKG | | | |
| CD3_sp11a VHVL_S | KNGMH | 136 | MIYYDSSKMYY | 134 | YSSDLDFDH | 620 |
| S_SANSPTM_Y | | | ADTVKG | | | |
| CD3_sp11a VHVL_S | KNGMH | 136 | MIYYDSSKMYY | 134 | SSSDLDFDH | 613 |
| S_SANSPTM_S | | | ADTVKG | | | |
| CD3_sp11a_VHVL_S | KNGMH | 136 | MIYYDSSKMYY | 134 | YSSDLDFDH | 620 |
| S_Y | | | ADTVKG | | | |
| CD3_sp11a_VHVL_S | KNGMH | 136 | MIYYDSSKMYY | 134 | SSSDLDFDH | 613 |
| S_S | | | ADTVKG | | | |
| CD3_sp11a_VHVL_ | KNGMH | 136 | MIYYDSSKMYY | 134 | FSSDLDFDH | 472 |
| SS_SANSPTM | | | ADTVKG | | | |
| CD3_sp11a VHVL_ | KNGMH | 136 | MIYYDSSKMYY | 134 | YWSDLDFDH | 624 |
| WS_SANSPTM | | | ADTVKG | | | |
| CD3_sp11a_VHVL | KNGMH | 136 | MIYYDSSKMYY | 134 | SWSDLDFDH | 617 |
| WS_SANSPTM_S | | | ADTVKG | | | |
| CD3_sp11a_VHVL_ | KNGMH | 136 | MIYYDSSKMYY | 134 | YWSDLDFDH | 624 |
| WS_Y | | | ADTVKG | | | |
| CD3_sp11a_VHVL_ | KNGMH | 136 | MIYYDSSKMYY | 134 | SWSDLDFDH | 617 |
| WS_S | | | ADTVKG | | | |
| CD3_sp11a_VHVL | KNGMH | 136 | MIYYDSSKMYY | 134 | FWSDLDFDH | 476 |
| WS_SANSPTM | | | ADTVKG | | | |
| CD3_sp11a_VHVl_ | KNGMH | 136 | MIYYDSSKMYY | 134 | YSWDLDFDH | 621 |
| SW _SANSPTM_Y | | | ADTVKG | | | |
| CD3_sp11a_VHVL_ | KNGMH | 136 | MIYYDSSKMYY | 134 | SSWDLDFDH | 614 |
| SW _SANSPTM_S | | | ADTVKG | | | |
| CD3 sp11a_VHVL_ | KNGMH | 136 | MIYYDSSKMYY | 134 | YSWDLDFDH | 621 |
| SW_ Y | | | ADTVKG | | | |
| CD3_sp11a_VHVL_ | KNGMH | 136 | MIYYDSSKMYY | 134 | SSWDLDFDH | 614 |
| SW _S | | | ADTVKG | | | |
| CD3_sp11a_VHVL_ | KNGMH | 136 | MIYYDSSKMYY | 134 | FSVVDLDFDH | 473 |
| SW _SANSPTM | | | ADTVKG | | | |
| CD3_sp11a_VHVL_ | KNGMH | 136 | MIYYDSSKMYY | 134 | YTVVDLDFDH | 623 |
| TW _SANSPTM_Y | | | ADTVKG | | | |
| CD3_sp11a_VHVL_ | KNGMH | 136 | MIYYDSSKMYY | 134 | STVVDLDFDH | 616 |
| TW _SANSPTM_S | | | ADTVKG | | | |
| CD3 sp11a_VHVL_ | KNGMH | 136 | MIYYDSSKMYY | 134 | YTVVDLDFDH | 623 |
| TW_Y | | | ADTVKG | | | |
| CD3 sp11a_VHVL_ | KNGMH | 136 | MIYYDSSKMYY | 134 | STVVDLDFDH | 616 |
| TW_S | | | ADTVKG | | | |
| CD3_sp11a_VHVL_ | KNGMH | 136 | MIYYDSSKMYY | 134 | FTVVDLDFDH | 475 |
| TW_SANSPTM | | | ADTVKG | | | |
| CD3_sp11a_VHVL_ | KNGMH | 136 | MIYYDSSKMYY | 134 | YTTDLDFDH | 622 |
| TT_SANSPTM_Y | | | ADTVKG | | | |
| CD3_sp11a_VHVL_T | KNGMH | 136 | MIYYDSSKMYY | 134 | STTDLDFDH | 615 |
| T_SANSPTM_S | | | ADTVKG | | | |
| CD3_sp11a_VHVL_T | KNGMH | 136 | MIYYDSSKMYY | 134 | YTTDLDFDH | 622 |
| T_Y | | | ADTVKG | | | |
| CD3_sp11a_VHVL_T | KNGMH | 136 | MIYYDSSKMYY | 134 | STTDLDFDH | 615 |
| T_S | | | ADTVKG | | | |
| CD3_sp11a_VHVL_T | KNGMH | 136 | MIYYDSSKMYY | 134 | FTTDLDFDH | 474 |
| T_SANSPTM | | | ADTVKG | | | |
| CD3_SP11AVH3_VLK_ | KNGMH | 136 | MIYYDSSKMYY | 134 | YVWVDLDFDH | 626 |
| 3_Y | | | ADTVKG | | | |
| CD3_SP11AVH3_VLK_ | KNGMH | 136 | MIYYDSSKMYY | 134 | SVWVDLDFDH | 618 |
| 3_S | | | ADTVKG | | | |
| CD3_SP11AVH3_VLK_ | KNGMH | 136 | MIYYDSSKMYY | 134 | YVWVDLDFDH | 626 |
| 3_Y_PTM | | | ADTVKG | | | |
| CD3_SP11AVH3_VLK_ | KNGMH | 136 | MIYYDSSKMYY | 134 | SVWVDLDFDH | 618 |
| 3_S_PTM | | | ADTVKG | | | |
| CD3_SP11AVH3_VLK_ | KNGMH | 136 | MIYYDSSKMYY | 134 | YSWDLDFDH | 621 |
| 3_Y_SW | | | ADTVKG | | | |
| CD3_SP11AVH3_VLK | KNGMH | 136 | MIYYDSSKMYY | 134 | SSWDLDFDH | 614 |
| 3_S_SW | | | ADTVKG | | | |
| CD3_SP11AVH3_VLK | KNGMH | 136 | MIYYDSSKMYY | 134 | YSWDLDFDH | 621 |
| 3_Y_PTM_SW | | | ADTVKG | | | |
| CD3_SP11AVH3_VLK_ | KNGMH | 136 | MIYYDSSKMYY | 134 | SSWDLDFDH | 614 |
| 3_ S_SVVPTM | | | ADTVKG | | | |
| CD3_SP11AVH3_VLK_ | KNGMH | 136 | MIYYDSSKMYY | 134 | FSVVDLDFDH | 473 |
| SVVPTM | | | ADTVKG | | | |
| CD3_SP11AVH3_VLK_ | KNGMH | 136 | MIYYDSSKMYY | 134 | FSVVDLDFDH | 473 |
| 3_SW | | | ADTVKG | | | |
| CD3_sp11a_VH1_VK | KNQMH | 482 | MIYYDSSKMYY | 134 | YVWVDLDFDH | 626 |
| 2_Y | | | ADTVKG | | | |
| CD3_sp11a_VH1_VK | KNQMH | 482 | MIYYDSSKMYY | 134 | SVWVDLDFDH | 618 |
| 2_S | | | ADTVKG | | | |
| CD3_sp11a_VH1_VK | KNQMH | 482 | MIYYDSSKMYY | 134 | YVWVDLDFDH | 626 |
| 2_Y_PTM | | | ADTVKG | | | |
| CD3_sp11a_VH1_VK | KNQMH | 482 | MIYYDSSKMYY | 134 | SVWVDLDFDH | 618 |
| 2_S_PTM | | | ADTVKG | | | |
| CD3_sp11a_VH1_VK | KNQMH | 482 | MIYYDSSKMYY | 134 | YSWDLDFDH | 621 |
| 2_Y_SW | | | ADTVKG | | | |
| CD3_sp11a_VH1_VK | KNQMH | 482 | MIYYDSSKMYY | 134 | SSWDLDFDH | 614 |
| 2_S_SW | | | ADTVKG | | | |
| CD3_sp11a_VH1_VK | KNQMH | 482 | MIYYDSSKMYY | 134 | YSWDLDFDH | 621 |
| 2_Y_PTM | | | ADTVKG | | | |
| CD3_sp11a_VH1_VK | KNQMH | 482 | MIYYDSSKMYY | 134 | SSWDLDFDH | 614 |
| 2_S_PTM_SW | | | ADTVKG | | | |
| CD3_sp11a_VH1_VK | KNQMH | 482 | MIYYDSSKMYY | 134 | FSVVDLDFDH | 473 |
| 2_SW | | | ADTVKG | | | |
| CD3_sp11a_VH1_VK | KNQMH | 482 | MIYYDSSKMYY | 134 | FSVVDLDFDH | 473 |
| 2_SW_PTM | | | ADTVKG | | | |
| CD3_SP11A_VH3_VL | KNGMH | 136 | MIYYDSSKMYY | 134 | YVWVDLDFDH | 626 |
| K1_Y | | | ADTVKG | | | |
| CD3_SP11A_VH3_VL | KNGMH | 136 | MIYYDSSKMYY | 134 | SVWVDLDFDH | 618 |
| K1_S | | | ADTVKG | | | |
| CD3_SP11A_VH3_VL | KNGMH | 136 | MIYYDSSKMYY | 134 | YVWVDLDFDH | 626 |
| K1_Y_PTM | | | ADTVKG | | | |
| CD3_SP11A_VH3_VL | KNGMH | 136 | MIYYDSSKMYY | 134 | SVWVDLDFDH | 618 |
| K1_S_PTM | | | ADTVKG | | | |
| CD3_SP11A_VH3_VL | KNGMH | 136 | MIYYDSSKMYY | 134 | YSWDLDFDH | 621 |
| K1_Y_SW | | | ADTVKG | | | |
| CD3_SP11A_VH3_VL | KNGMH | 136 | MIYYDSSKMYY | 134 | SSWDLDFDH | 614 |
| K1_S_SW | | | ADTVKG | | | |
| CD3_SP11A_VH3_VL | KNGMH | 136 | MIYYDSSKMYY | 134 | YVWVDLDFDH | 626 |
| K1_Y_PTM | | | ADTVKG | | | |
| CD3_SP11A_VH3_VL | KNGMH | 136 | MIYYDSSKMYY | 134 | SSWDLDFDH | 614 |
| K1_S_PTM_SW | | | ADTVKG | | | |
| CD3_SP11A_VH3_VL | KNGMH | 136 | MIYYDSSKMYY | 134 | FSVVDLDFDH | 473 |
| KlPTM_SW | | | ADTVKG | | | |
| CD3_SP11A_VH3_VL | KNGMH | 136 | MIYYDSSKMYY | 134 | FSVVDLDFDH | 473 |
| K1_SW | | | ADTVKG | | | |
| CD3_SP11A_VH5_VK | KQGMH | 483 | MIYYDSSKMYY | 134 | YVWVDLDFDH | 626 |
| 2_Y | | | ADTVKG | | | |
| CD3_SP11A_VH5_VK | KQGMH | 483 | MIYYDSSKMYY | 134 | SVWVDLDFDH | 618 |
| 2_S | | | ADTVKG | | | |
| CD3_SP11A_VH5_VK | KQGMH | 483 | MIYYDSSKMYY | 134 | YVWVDLDFDH | 626 |
| 2_Y_PTM | | | ADTVKG | | | |
| CD3_SP11A_VH5_VK | KQGMH | 483 | MIYYDSSKMYY | 134 | SVWVDLDFDH | 618 |
| 2_S_PTM | | | ADTVKG | | | |
| CD3_SP11A_VH5_VK | KQGMH | 483 | MIYYDSSKMYY | 134 | YSWDLDFDH | 621 |
| 2_Y_SW | | | ADTVKG | | | |
| CD3_SP11A_VH5_VK | KQGMH | 483 | MIYYDSSKMYY | 134 | SSWDLDFDH | 614 |
| 2_S_SW | | | ADTVKG | | | |
| CD3_SP11A_VH5_VK | KQGMH | 483 | MIYYDSSKMYY | 134 | YSWDLDFDH | 621 |
| 2_Y_PTM_SW | | | ADTVKG | | | |
| CD3_SP11A_VH5_VK | KQGMH | 483 | MIYYDSSKMYY | 134 | SSWDLDFDH | 614 |
| 2_S_PTM_SW | | | ADTVKG | | | |
| CD3_SP11A_VH5_VK | KQGMH | 483 | MIYYDSSKMYY | 134 | FSVVDLDFDH | 473 |
| 2_PTM_SW | | | ADTVKG | | | |
| CD3_SP11A_VH5_VK | KQGMH | 483 | MIYYDSSKMYY | 134 | FSVVDLDFDH | 473 |
| 2_SW | | | ADTVKG | | | |

TABLE 1D-2
CD3 Binders - Light Chain CDR sequences according to Kabat numbering scheme

| | | SEQ ID | | SEQ ID | | SEQ ID |
|---|---|---|---|---|---|---|
| Binder | CDR-L1 | NO: | CDR-L2 | NO: | CDR-L3 | NO: |
| NOV292 | RSSQSLVRSD | 152 | RVSNR | 153 | LQSSHFP | 154 |
| | GTTYFN | | FS | | WT | |
| NOV123 | RSSQSLIYSIGN | 184 | RVSNR | 185 | FQSTHLP | 186 |
| | TYLH | | FS | | YT | |
| Sp10b | RSSQSLIYSIGN | 181 | RVSNR | 150 | FQSTHLP | 183 |
| | TYLH | | FS | | YT | |
| NOV453 | KASQNINNYLN | 216 | NTDHL | 217 | LQHRSR | 218 |
| | | | QA | | YT | |
| NOV229 | KASQNINNYLN | 248 | NTDHL | 249 | LQHRSR | 250 |
| | | | QA | | YT | |
| NOV110 | RSSQSLVYSHG | 280 | RVSNR | 281 | FQSTHLP | 282 |
| | NTYLH | | FS | | YT | |
| NOV832 | RSSQSLVYSHG | 312 | RVSNR | 313 | FQSTHLP | 314 |
| | NTYLH | | FS | | YT | |
| NOV589 | RSSQSLVRSD | 344 | RVSNR | 345 | LQSSHFP | 346 |
| | GTTYFN | | FS | | WT | |
| NOV580 | KTSQNIDKYLN | 376 | NTNNL | 377 | LQHRSSY | 378 |
| | | | EA | | T | |
| NOV567 | RGSQSIGNSLN | 408 | STSTL | 409 | LQYATYP | 410 |
| | | | EY | | YT | |
| NOV221 | KSSQNIDKYLN | 440 | NTNNL | 441 | LQHRSG | 442 |
| | | | EA | | YT | |
| CD3_sp11a_bkm1 | RSSQSLVRSD | 149 | RVSNR | 150 | LQSSHFP | 151 |
| | GTTYFN | | FS | | WT | |
| CD3_SP11a_bkm2 | RSSQSLVRSD | 149 | RVSNR | 150 | LQSSHFP | 151 |
| | GTTYFN | | FS | | WT | |
| CD3_sp11a_hz0 | RSSQSLVRSD | 149 | RVSNR | 150 | LQSSHFP | 151 |
| | GTTYFN | | FS | | WT | |
| CD3_SP11A_HZ1 | RSSQSLVRSD | 149 | RVSNR | 150 | LQSSH | 484 |
| | GTTYFN | | FS | | | |
| CD3_sp11a_sansPTM_hz1 | RSSQSLVRSEG | 487 | RVSNR | 150 | LQSSHFP | 151 |
| | TTYFN | | FS | | WT | |
| CD3_sp11a_sansPTM_rat | RSSQSLVRSEG | 487 | RVSNR | 150 | LQSSHFP | 151 |
| | TTYFN | | FS | | WT | |
| CD3_sp11a_VHVL_YY | RSSQSLVRSD | 149 | RVSNR | 150 | LQSSHFP | 151 |
| | GTTYFN | | FS | | WT | |
| CD3_SP11A_VHVL_SS | RSSQSLVRSD | 149 | RVSNR | 150 | LQSSHFP | 151 |
| | GTTYFN | | FS | | WT | |
| CD3_SP11A_VHVL_WS | RSSQSLVRSD | 149 | RVSNR | 150 | LQSSHFP | 151 |
| | GTTYFN | | FS | | WT | |
| CD3_sp11a_VHVL_SW | RSSQSLVRSD | 149 | RVSNR | 150 | LQSSHFP | 151 |
| | GTTYFN | | FS | | WT | |
| CD3_SP11A_VHVL_TT | RSSQSLVRSD | 149 | RVSNR | 150 | LQSSHFP | 151 |
| | GTTYFN | | FS | | WT | |
| CD3_SP11A_VHVL_TW | RSSQSLVRSD | 149 | RVSNR | 150 | LQSSHFP | 151 |
| | GTTYFN | | FS | | WT | |
| CD3_SP11A_VHVL_VVT | RSSQSLVRSD | 149 | RVSNR | 150 | LQSSHFP | 151 |
| | GTTYFN | | FS | | WT | |
| CD3_SP11A VH3_VLK_3 | RSSQSLVRSEG | 487 | RVSNR | 150 | LQSSHFP | 151 |
| | TTYFN | | FS | | WT | |
| CD3_sp11a_VH1_VK2 | RSSQSLVRSD | 149 | RVSNR | 150 | LQSSHFP | 151 |
| | GTTYFN | | FS | | WT | |
| CD3_SP11A_VH3_VLK1 | RSSQSLVRSEG | 487 | RVSNR | 150 | LQSSHFP | 151 |
| | TTYFN | | FS | | WT | |
| CD3_SP11A_VH5_VK2 | RSSQSLVRSD | 149 | RVSNR | 150 | LQSSHFP | 151 |
| | GTTYFN | | FS | | WT | |
| CD3_sp9aFW1_VL_VH_S5 | KASQNINNYLN | 213 | NTDHL | 214 | LQHRSR | 215 |
| 6G | | | QA | | YT | |
| CD3_SP9AFW4_VL_VH_S | KASQNINNYLN | 213 | NTDHL | 214 | LQHRSR | 215 |
| 56G | | | QA | | YT | |
| CD3_sp9aFW1_VLVH | KASQNINNYLN | 213 | NTDHL | 214 | LQHRSR | 215 |
| | | | QA | | YT | |
| CD3_sp9aFW4_VLVH | KASQNINNYLN | 213 | NTDHL | 214 | LQHRSR | 215 |
| | | | QA | | YT | |
| CD3_sp9arabtor_VHVL | KASQNINNYLN | 213 | NTDHL | 214 | LQHRSR | 215 |
| | | | QA | | YT | |
| CD3_sp9arabtor_VLVH | KASQNINNYLN | 213 | NTDHL | 214 | LQHRSR | 215 |
| | | | QA | | YT | |
| CD3_sp11a_VHVL_YY_SA | RSSQSLVRSEG | 487 | RVSNR | 150 | LQSSHFP | 151 |
| NSPTM | TTYFN | | FS | | WT | |
| CD3_sp11a_VHVL_YY_SA | RSSQSLVRSEG | 487 | RVSNR | 150 | LQSSHFP | 151 |
| NSPTM_Y | TTYFN | | FS | | WT | |
| CD3_sp11a_VHVL_YY_SA | RSSQSLVRSEG | 487 | RVSNR | 150 | LQSSHFP | 151 |
| NSPTM_S | TTYFN | | FS | | WT | |
| CD3_sp11a_VHVL_YY_Y | RSSQSLVRSD | 149 | RVSNR | 150 | LQSSHFP | 151 |
| | GTTYFN | | FS | | WT | |
| CD3_sp11a_VHVL_YY_s | RSSQSLVRSD | 149 | RVSNR | 150 | LQSSHFP | 151 |
| | GTTYFN | | FS | | WT | |
| CD3_sp11a_VHVL_SS_SA | RSSQSLVRSEG | 487 | RVSNR | 150 | LQSSHFP | 151 |
| NSPTM | TTYFN | | FS | | WT | |
| CD3_sp11a_VHVL_SS_SA | RSSQSLVRSEG | 487 | RVSNR | 150 | LQSSHFP | 151 |
| NSPTM Y | TTYFN | | FS | | WT | |
| CD3_sp-11a_VHVL_SS_SA | RSSQSLVRSEG | 487 | RVSNR | 150 | LQSSHFP | 151 |
| NSPTM_S | TTYFN | | FS | | WT | |
| CD3_sp11a_VHVL_SS_Y | RSSQSLVRSD | 149 | RVSNR | 150 | LQSSHFP | 151 |
| | GTTYFN | | FS | | WT | |
| CD3_sp11a_VHVL_SS_S | RSSQSLVRSD | 149 | RVSNR | 150 | LQSSHFP | 151 |
| | GTTYFN | | FS | | WT | |
| CD3_sp11a VHVL_SS_ | RSSQSLVRSEG | 487 | RVSNR | 150 | LQSSHFP | 151 |
| SANSPTM | TTYFN | | FS | | WT | |
| CD3_sp11aVHVL_WS_ | RSSQSLVRSEG | 487 | RVSNR | 150 | LQSSHFP | 151 |
| SANSPTM_Y | TTYFN | | FS | | WT | |
| CD3_sp11a_VHVL_WS_ | RSSQSLVRSEG | 487 | RVSNR | 150 | LQSSHFP | 151 |
| SANSPTM_S | TTYFN | | FS | | WT | |
| CD3_sp11a1_VHVL_WS_Y | RSSQSLVRSD | 149 | RVSNR | 150 | LQSSHFP | 151 |
| | GTTYFN | | FS | | WT | |
| CD3_sp11a_VHVL_WS_S | RSSQSLVRSD | 149 | RVSNR | 150 | LQSSHFP | 151 |
| | GTTYFN | | FS | | WT | |
| CD3_sp11a_VHVL_WS_ | RSSQSLVRSEG | 487 | RVSNR | 150 | LQSSHFP | 151 |
| SANSPTM | TTYFN | | FS | | WT | |
| CD3_sp11a_VHVL_SW_ | RSSQSLVRSEG | 487 | RVSNR | 150 | LQSSHFP | 151 |
| SANSPTM_Y | TTYFN | | FS | | WT | |
| CD3_sp11a_VHVL_SW_ | RSSQSLVRSEG | 487 | RVSNR | 150 | LQSSHFP | 151 |
| SANSPTM_S | TTYFN | | FS | | WT | |
| CD3_sp11a_VHVL_SW_Y | RSSQSLVRSD | 149 | RVSNR | 150 | LQSSHFP | 151 |
| | GTTYFN | | FS | | WT | |
| CD3_sp11a_VHVL_SW_S | RSSQSLVRSD | 149 | RVSNR | 150 | LQSSHFP | 151 |
| | GTTYFN | | FS | | WT | |
| CD3_sp11a_VHVL_ SW_ | RSSQSLVRSEG | 487 | RVSNR | 150 | LQSSHFP | 151 |
| SANSPTM | TTYFN | | FS | | WT | |
| CD3_sp11a_VHVL_TW_ | RSSQSLVRSEG | 487 | RVSNR | 150 | LQSSHFP | 151 |
| SANSPTM_Y | TTYFN | | FS | | WT | |
| CD3_sp11a_VHVL_TW_ | RSSQSLVRSEG | 487 | RVSNR | 150 | LQSSHFP | 151 |
| SANSPTM_S | TTYFN | | FS | | WT | |
| CD3_sp11a_VHVL_TW_Y | RSSQSLVRSD | 149 | RVSNR | 150 | LQSSHFP | 151 |
| | GTTYFN | | FS | | WT | |
| CD3_sp11a_VHVL_TW_S | RSSQSLVRSD | 149 | RVSNR | 150 | LQSSHFP | 151 |
| | GTTYFN | | FS | | WT | |
| CD3_sp11a_VHVL_TW_ | RSSQSLVRSEG | 487 | RVSNR | 150 | LQSSHFP | 151 |
| SANSPTM | TTYFN | FS | WT | | | |
| CD3_sp11a_VHVL_TT_ | RSSQSLVRSEG | 487 | RVSNR | 150 | LQSSHFP | 151 |
| SANSPTM_Y | TTYFN | | FS | | WT | |
| CD3_sp11a_VHVL_TT_SA | RSSQSLVRSEG | 487 | RVSNR | 150 | LQSSHFP | 151 |
| NSPTM_S | TTYFN | | FS | | WT | |
| CD3_sp11a_VHVL_TT_Y | RSSQSLVRSD | 149 | RVSNR | 150 | LQSSHFP | 151 |
| | GTTYFN | | FS | | WT | |
| CD3_sp11a_VHVL_TT_S | RSSQSLVRSD | 149 | RVSNR | 150 | LQSSHFP | 151 |
| | GTTYFN | | FS | | WT | |
| CD3_sp11a_VHVL_TT_SA | RSSQSLVRSEG | 487 | RVSNR | 150 | LQSSHFP | 151 |
| NSPTM | TTYFN | | FS | | WT | |
| CD3_SP11AVH3_VLK_3_Y | RSSQSLVRSEG | 487 | RVSNR | 150 | LQSSHFP | 151 |
| | TTYFN | | FS | | WT | |
| CD3_SP11AVH3_VLK_3_S | RSSQSLVRSEG | 487 | RVSNR | 150 | LQSSHFP | 151 |
| | TTYFN | | FS | | WT | |
| CD3_SP11AVH3_VLK_3_Y | RSSQSLVRSD | 149 | RVSNR | 150 | LQSSHFP | 151 |
| PTM | GTTYFN | | FS | | WT | |
| CD3_SP11AVH3_VLK_3_S_ | RSSQSLVRSD | 149 | RVSNR | 150 | LQSSHFP | 151 |
| PTM | GTTYFN | | FS | | WT | |
| CD3 SP11AVH3_VLK_3_Y_ | RSSQSLVRSEG | 487 | RVSNR | 150 | LQSSHFP | 151 |
| SW | TTYFN | | FS | | WT | |
| CD3 SP11AVH3_VLK_3_S_ | RSSQSLVRSEG | 487 | RVSNR | 150 | LQSSHFP | 151 |
| SW | TTYFN | | FS | | WT | |
| CD3_SP11AVH3_VLK_3_Y_ | RSSQSLVRSD | 149 | RVSNR | 150 | LQSSHFP | 151 |
| PTM_SW | GTTYFN | | FS | | WT | |
| CD3_SP11AVH3_VLK_3_S_ | RSSQSLVRSD | 149 | RVSNR | 150 | LQSSHFP | 151 |
| TM | GTTYFN | | FS | | WT | |
| CD3_SP11AVH3_VLK_ | RSSQSLVRSD | 149 | RVSNR | 150 | LQSSHFP | 151 |
| SWPTM | GTTYFN | | FS | | WT | |
| CD3_SP11AVH3_VLK_3_SW | RSSQSLVRSEG | 487 | RVSNR | 150 | LQSSHFP | 151 |
| | TTYFN | | FS | | WT | |
| CD3_sp11a_VH1_VK2_Y | RSSQSLVRSD | 149 | RVSNR | 150 | LQSSHFP | 151 |
| | GTTYFN | | FS | | WT | |
| CD3_sp11a_VH1_VK2_S | RSSQSLVRSD | 149 | RVSNR | 150 | LQSSHFP | 151 |
| | GTTYFN | | FS | | WT | |
| CD3_sp11a_VH1_VK2_Y_ | RSSQSLVRSEG | 487 | RVSNR | 150 | LQSSHFP | 151 |
| PTM | TTYFN | | FS | | WT | |
| CD3_sp11a_VH1_VK2_S_ | RSSQSLVRSEG | 487 | RVSNR | 150 | LQSSHFP | 151 |
| PTM | TTYFN | | FS | | WT | |
| CD3_sp11a_VH1_VK2_Y_ | RSSQSLVRSD | 149 | RVSNR | 150 | LQSSHFP | 151 |
| SW | GTTYFN | | FS | | WT | |
| CD3_sp11a_VH1_VK2_S_ | RSSQSLVRSD | 149 | RVSNR | 150 | LQSSHFP | 151 |
| SW | GTTYFN | | FS | | WT | |
| CD3_sp11a_VH1_VK2_Y_ | RSSQSLVRSEG | 487 | RVSNR | 150 | LQSSHFP | 151 |
| PTM | TTYFN | | FS | | WT | |
| CD3_sp11a_VH1_VK2_S_ | RSSQSLVRSEG | 487 | RVSNR | 150 | LQSSHFP | 151 |
| PTM_SW | TTYFN | | FS | | WT | |
| CD3_sp11a_VH1_VK2_SW | RSSQSLVRSD | 149 | RVSNR | 150 | LQSSHFP | 151 |
| | GTTYFN | | FS | | WT | |
| CD3_sp11a_VH1_VK2_SW_ | RSSQSLVRSEG | 487 | RVSNR | 150 | LQSSHFP | 151 |
| PTM | TTYFN | | FS | | WT | |
| CD3_SP11A_VH3_VLK1_Y | RSSQSLVRSEG | 487 | RVSNR | 150 | LQSSHFP | 151 |
| | TTYFN | | FS | | WT | |
| CD3_SP11A_VH3_VLK1_S | RSSQSLVRSEG | 487 | RVSNR | 150 | LQSSHFP | 151 |
| | TTYFN | | FS | | WT | |
| CD3_SP11A_VH3_VLK1_Y_ | RSSQSLVRSD | 149 | RVSNR | 150 | LQSSHFP | 151 |
| PTM | GTTYFN | | FS | | WT | |
| CD3_SP11A_VH3_VLK1_S_ | RSSQSLVRSD | 149 | RVSNR | 150 | LQSSHFP | 151 |
| PTM | GTTYFN | | FS | | WT | |
| CD3_SP11A_VH3_VLK1_Y_ | RSSQSLVRSEG | 487 | RVSNR | 150 | LQSSHFP | 151 |
| SW | TTYFN | | FS | | WT | |
| CD3_SP11A_VH3_VLK1_S_ | RSSQSLVRSEG | 487 | RVSNR | 150 | LQSSHFP | 151 |
| SW | TTYFN | | FS | | WT | |
| CD3_SP11A_VH3_VLK1_Y_ | RSSQSLVRSD | 149 | RVSNR | 150 | LQSSHFP | 151 |
| PTM | GTTYFN | | FS | | WT | |
| CD3_SP11A_VH3_VLK1_S_ | RSSQSLVRSD | 149 | RVSNR | 150 | LQSSHFP | 151 |
| PTM_SW | GTTYFN | | FS | | WT | |
| CD3_SP11A_VH3_VLK1P | RSSQSLVRSD | 149 | RVSNR | 150 | LQSSHFP | 151 |
| TM_SW | GTTYFN | | FS | | WT | |
| CD3_SP11A_VH3_VLK1_S | RSSQSLVRSEG | 487 | RVSNR | 150 | LQSSHFP | 151 |
| W | TTYFN | FS | WT | | | |
| CD3_SP11A_VH5_VK2_Y | RSSQSLVRSD | 149 | RVSNR | 150 | LQSSHFP | 151 |
| | GTTYFN | | FS | | WT | |
| CD3_SP11A_VH5_VK2_S | RSSQSLVRSD | 149 | RVSNR | 150 | LQSSHFP | 151 |
| | GTTYFN | | FS | | WT | |
| CD3_SP11A_VH5_VK2_Y_ | RSSQSLVRSD | 149 | RVSNR | 150 | LQSSHFP | 151 |
| PTM | GTTYFN | | FS | | WT | |
| CD3_SP11A_VH5_VK2_S_ | RSSQSLVRSD | 149 | RVSNR | 150 | LQSSHFP | 151 |
| PTM | GTTYFN | | FS | | WT | |
| CD3_SP11A_VH5_VK2_Y_ | RSSQSLVRSD | 149 | RVSNR | 150 | LQSSHFP | 151 |
| SW | GTTYFN | | FS | | WT | |
| CD3_SP11A_VH5_VK2_S_ | RSSQSLVRSD | 149 | RVSNR | 150 | LQSSHFP | 151 |
| SW | GTTYFN | | FS | | WT | |
| CD3_SP11A_VH5_VK2_Y_ | RSSQSLVRSD | 149 | RVSNR | 150 | LQSSHFP | 151 |
| PTM_SW | GTTYFN | | FS | | WT | |
| CD3_SP11A_VH5_VK2_S_ | RSSQSLVRSD | 149 | RVSNR | 150 | LQSSHFP | 151 |
| PTM_SW | GTTYFN | | FS | | WT | |
| CD3_5P11A_VH5_VK2_P | RSSQSLVRSD | 149 | RVSNR | 150 | LQSSHFP | 151 |
| TM_SW | GTTYFN | | FS | | WT | |
| CD3_SP11A_VH5_VK2_S | RSSQSLVRSD | 149 | RVSNR | 150 | LQSSHFP | 151 |
| W | GTTYFN | | FS | | WT | |

TABLE 1E-1
CD3 Binders - Heavy Chain CDR sequences according to Chothia numbering
scheme

| | | SEQ | | SEQ ID | | SEQ ID |
|---|---|---|---|---|---|---|
| Binder | CDR-H1 | ID NO: | CDR-H2 | NO: | CDR-H3 | NO: |
| NOV292 | GFTFSKN | 139 | YYDSSK | 140 | FVWVDLDFDH | 141 |
| NOV123 | GYTFTSY | 171 | YPGHDA | 172 | PNTMMAPLAY | 173 |
| Sp10b | GYTFTSY | 171 | YPGHDA | 172 | PNTMMAPLAY | 167 |
| NOV453 | GFSLTTY | 203 | RYSGD | 204 | DPMYIPNYSYG | 205 |
| | | | | | VMNA | |
| NOV229 | GFSLTTY | 235 | RYSGD | 236 | DPMYIPNYSYG | 237 |
| | | | | | VMNA | |
| NOV110 | GYTFTSY | 267 | YPANGG | 268 | PVTMMAPLVF | 269 |
| NOV832 | GYTFTSY | 299 | YPANGG | 300 | PVTMMAPLVF | 301 |
| NOV589 | GFTFSKN | 331 | YYDSSR | 332 | FVWVDLDFDY | 333 |
| NOV580 | GFSLTTY | 363 | RYSGD | 364 | DPMYIPGYSYG | 365 |
| | | | | | VMNA | |
| NOV567 | GFAFRKY | 395 | YYDSSK | 396 | LNSEYD | 397 |
| NOV221 | GFSLTTY | 427 | RYSGD | 428 | DPMYIPGYSYG | 429 |
| | | | | | VMNA | |
| CD3_sp11a_bkm1 | GFTFSKN | 139 | YYDSSK | 140 | FVWVDLDFDH | 135 |
| CD3_SP11a_bkm2 | GFTFSKN | 139 | YYDSSK | 140 | FVWVDLDFDH | 135 |
| CD3_sp11a_hz0 | GFTFSKN | 139 | YYDSSK | 140 | FVWVDLDFDH | 135 |
| CD3_SP11A_HZ1 | GFTFSKN | 139 | YYDSSK | 140 | FVWVDLDFDH | 135 |
| CD3_sp11a_sansPTM_hz1 | GFTFSKQ | 479 | YYDSSK | 140 | FVWVDLDFDH | 135 |
| CD3_sp11a_sansPTM_rat | GFTFSKQ | 479 | YYDSSK | 140 | FVWVDLDFDH | 135 |
| CD3_sp11a_VHVL_YY | GFTFSKN | 139 | YYDSSK | 140 | FYYDLDFDH | 478 |
| CD3_SP11A_VHVL_SS | GFTFSKN | 139 | YYDSSK | 140 | FSSDLDFDH | 472 |
| CD3_SP11A_VHVL_WS | GFTFSKN | 139 | YYDSSK | 140 | FWSDLDFDH | 476 |
| CD3_sp11a_VHVL_SW | GFTFSKN | 139 | YYDSSK | 140 | FSVVDLDFDH | 473 |
| CD3_SP11A_VHVL_TT | GFTFSKN | 139 | YYDSSK | 140 | FTTDLDFDH | 474 |
| CD3_SP11A_VHVL_TW | GFTFSKN | 139 | YYDSSK | 140 | FTWDLDFDH | 475 |
| CD3_SP11A_VHVL_VVT | GFTFSKN | 139 | YYDSSK | 140 | FVVTDLDFDH | 477 |
| CD3_SP11A_VH3_VLK_3 | GFTFSKN | 139 | YYDSSK | 140 | FVWVDLDFDH | 135 |
| CD3_sp11a_VH1_VK2 | GFTFSKQ | 479 | YYDSSK | 140 | FVWVDLDFDH | 135 |
| CD3_SP11A_VH3_VLK1 | GFTFSKN | 139 | YYDSSK | 140 | FVWVDLDFDH | 135 |
| CD3_SP11A_VH5_VK2 | GFTFSKQ | 479 | YYDSSK | 140 | FVWVDLDFDH | 135 |
| CD3_sp9aFW1_VL_VH_S5 | GFSLTTY | 203 | RYSGD | 204 | DPMYIPNYAYG | 471 |
| 6G | | | | | VMNA | |
| CD3_SP9AFW4_VL_VH_S | GFSLTTY | 203 | RYSGD | 204 | DPMYIPNYAYG | 471 |
| 56G | | | | | VMNA | |
| CD3_sp9aFW1_VLVH | GFSLTTY | 203 | RYSGD | 204 | DPMYIPNYAYG | 471 |
| | | | | | VMNA | |
| CD3_sp9aFW4_VLVH | GFSLTTY | 203 | RYSGD | 204 | DPMYIPNYAYG | 471 |
| | | | | | VMNA | |
| CD3_sp9arabtor_VHVL | GFSLTTY | 203 | RYSGD | 204 | DPMYIPNYAYG | 471 |
| | | | | | VMNA | |
| CD3_sp9arabtor_VLVH | GFSLTTY | 203 | RYSGD | 204 | DPMYIPNYAYG | 471 |
| | | | | | VMNA | |
| CD3_sp11a_VHVL_YY_SA | GFTFSKQ | 479 | YYDSSK | 140 | FYYDLDFDH | 478 |
| NSPTM | | | | | | |
| CD3_sp11a_VHVL_YY_SA | GFTFSKQ | 479 | YYDSSK | 140 | YYYDLDFDH | 627 |
| NSPTM_Y | | | | | | |
| CD3_sp11a_VHVL_YY_SA | GFTFSKQ | 479 | YYDSSK | 140 | SYYDLDFDH | 619 |
| NSPTM_S | | | | | | |
| CD3_sp11a_VHVL_YY_Y | GFTFSKN | 139 | YYDSSK | 140 | YYYDLDFDH | 627 |
| CD3_sp11a_VHVL_YY_s | GFTFSKN | 139 | YYDSSK | 140 | SYYDLDFDH | 619 |
| CD3_sp11a_VHVL_SS_SA | GFTFSKQ | 479 | YYDSSK | 140 | FSSDLDFDH | 472 |
| NSPTM | | | | | | |
| CD3_sp11a_VHVL_SS_SA | GFTFSKQ | 479 | YYDSSK | 140 | YSSDLDFDH | 620 |
| NSPTM_Y | | | | | | |
| CD3_sp11a_VHVL_SS_SA | GFTFSKQ | 479 | YYDSSK | 140 | SSSDLDFDH | 613 |
| NSPTM_S | | | | | | |
| CD3_sp11a_VHVL_SS_Y | GFTFSKN | 139 | YYDSSK | 140 | YSSDLDFDH | 620 |
| CD3_sp11a_VHVL_SS_S | GFTFSKN | 139 | YYDSSK | 140 | SSSDLDFDH | 613 |
| CD3_sp11a_VHVL_SS_ | GFTFSKQ | 479 | YYDSSK | 140 | FSSDLDFDH | 472 |
| SANSPTM | | | | | | |
| CD3_sp11a_VHVL_WS_ | GFTFSKQ | 479 | YYDSSK | 140 | YWSDLDFDH | 624 |
| SANSPTM_Y | | | | | | |
| CD3_sp11a_VHVL_WS_ | GFTFSKQ | 479 | YYDSSK | 140 | SWSDLDFDH | 617 |
| SANSPTM_S | | | | | | |
| CD3_sp11a_VHVL_WS_Y | GFTFSKN | 139 | YYDSSK | 140 | YWSDLDFDH | 625 |
| CD3_sp11a_VHVL_WS_S | GFTFSKN | 139 | YYDSSK | 140 | SWSDLDFDH | 617 |
| CD3_sp11a_VHVL_WS_ | GFTFSKQ | 479 | YYDSSK | 140 | FWSDLDFDH | 476 |
| SANSPTM | | | | | | |
| CD3_sp11a_VHVL_SW_ | GFTFSKQ | 479 | YYDSSK | 140 | YSVVDLDFDH | 621 |
| SANSPTM_Y | | | | | | |
| CD3_sp11a_VHVL_SW_ | GFTFSKQ | 479 | YYDSSK | 140 | SSVVDLDFDH | 614 |
| SANSPTM_S | | | | | | |
| CD3_sp11a_VHVL_SW_Y | GFTFSKN | 139 | YYDSSK | 140 | YSVVDLDFDH | 621 |
| CD3_sp11a_VHVL_SW_S | GFTFSKN | 139 | YYDSSK | 140 | SSVVDLDFDH | 614 |
| CD3_sp11a_VHVL_SW_ | GFTFSKQ | 479 | YYDSSK | 140 | FSVVDLDFDH | 473 |
| SANSPTM | | | | | | |
| CD3_sp11a_VHVL_TW_ | GFTFSKQ | 479 | YYDSSK | 140 | YTVVDLDFDH | 623 |
| SANSPTM_Y | | | | | | |
| CD3_sp11a_VHVL_TW_ | GFTFSKQ | 479 | YYDSSK | 140 | STVVDLDFDH | 616 |
| SANSPTM_S | | | | | | |
| CD3_sp11a_VHVL_TW_Y | GFTFSKN | 139 | YYDSSK | 140 | YTWDLDFDH | 623 |
| CD3_sp11a_VHVL_TW_S | GFTFSKN | 139 | YYDSSK | 140 | STWDLDFDH | 616 |
| CD3_sp11a_VHVL_TW_ | GFTFSKQ | 479 | YYDSSK | 140 | FTVVDLDFDH | 475 |
| SANSPTM | | | | | | |
| CD3_sp11a_VHVL_TT_ | GFTFSKQ | 479 | YYDSSK | 140 | YTTDLDFDH | 622 |
| SANSPTM_Y | | | | | | |
| CD3_sp11a_VHVL_TT_SA | GFTFSKQ | 479 | YYDSSK | 140 | STTDLDFDH | 615 |
| NSPTM_S | | | | | | |
| CD3_sp11a_VHVL_TT_Y | GFTFSKN | 139 | YYDSSK | 140 | YTTDLDFDH | 622 |
| CD3_sp11a_VHVL_TT_S | GFTFSKN | 139 | YYDSSK | 140 | STTDLDFDH | 615 |
| CD3_sp11a_VHVL_TT_SA | GFTFSKQ | 479 | YYDSSK | 140 | FTTDLDFDH | 474 |
| NSPTM | | | | | | |
| CD3_SP11AVH3_VLK_3_Y | GFTFSKN | 139 | YYDSSK | 140 | YVWVDLDFDH | 626 |
| CD3_SP11AVH3_VLK_3_S | GFTFSKN | 139 | YYDSSK | 140 | SVWVDLDFDH | 618 |
| CD3_SP11AVH3_VLK_3_Y_ | GFTFSKN | 139 | YYDSSK | 140 | YVWVDLDFDH | 626 |
| PTM | | | | | | |
| CD3_SP11AVH3_VLK_3_ | GFTFSKN | 139 | YYDSSK | 140 | SVWVDLDFDH | 618 |
| S_PTM | | | | | | |
| CD3_SP11AVH3_VLK_3_ | GFTFSKN | 139 | YYDSSK | 140 | YSVVDLDFDH | 621 |
| Y_SW | | | | | | |
| CD3_SP11AVH3_VLK_3_ | GFTFSKN | 139 | YYDSSK | 140 | SSVVDLDFDH | 614 |
| S_SW | | | | | | |
| CD3_SP11AVH3_VLK_3_ | GFTFSKN | 139 | YYDSSK | 140 | YSVVDLDFDH | 621 |
| Y_PTM_SW | | | | | | |
| CD3_SP11AVH3_VLK_3_ | GFTFSKN | 139 | YYDSSK | 140 | SSVVDLDFDH | 614 |
| S_SWPTM | | | | | | |
| CD3_SP11AVH3_VLK_SW | GFTFSKN | 139 | YYDSSK | 140 | FSVVDLDFDH | 473 |
| PTM | | | | | | |
| CD3_SP11AVH3_VLK_3_ | GFTFSKN | 139 | YYDSSK | 140 | FSVVDLDFDH | 473 |
| SW | | | | | | |
| CD3_sp11a_VH1_VK2_Y | GFTFSKQ | 479 | YYDSSK | 140 | YVWVDLDFDH | 626 |
| CD3_sp11a_VH1_VK2_S | GFTFSKQ | 479 | YYDSSK | 140 | SVWVDLDFDH | 618 |
| CD3_sp11a_VH1_VK2_Y_ | GFTFSKN | 139 | YYDSSK | 140 | YVWVDLDFDH | 626 |
| PTM | | | | | | |
| CD3_sp11a_VH1_VK2_S_ | GFTFSKN | 139 | YYDSSK | 140 | SVWVDLDFDH | 618 |
| PTM | | | | | | |
| CD3_sp11a_VH1_VK2_Y_ | GFTFSKQ | 479 | YYDSSK | 140 | YSVVDLDFDH | 621 |
| SW | | | | | | |
| CD3_sp11a_VH1_VK2_S_ | GFTFSKQ | 479 | YYDSSK | 140 | SSVVDLDFDH | 614 |
| SW | | | | | | |
| CD3_sp11a_VH1_VK2_Y_ | GFTFSKN | 139 | YYDSSK | 140 | YSVVDLDFDH | 621 |
| PTM | | | | | | |
| CD3_sp11a_VH1_VK2_S_ | GFTFSKN | 139 | YYDSSK | 140 | SSVVDLDFDH | 614 |
| PTM_SW | | | | | | |
| CD3_sp11a_VH1_VK2_SW | GFTFSKQ | 479 | YYDSSK | 140 | FSVVDLDFDH | 473 |
| CD3_sp11a_VH1_VK2_S | GFTFSKN | 139 | YYDSSK | 140 | FSVVDLDFDH | 473 |
| W_PTM | | | | | | |
| CD3_SP11A_VH3_VLK1_Y | GFTFSKN | 139 | YYDSSK | 140 | YVWVDLDFDH | 626 |
| CD3_SP11A_VH3_VLK1_S | GFTFSKN | 139 | YYDSSK | 140 | SVWVDLDFDH | 618 |
| CD3_SP11A_VH3_VLK1_ | GFTFSKQ | 479 | YYDSSK | 140 | YVWVDLDFDH | 626 |
| Y_PTM | | | | | | |
| CD3_SP11A_VH3_VLK1_ | GFTFSKN | 139 | YYDSSK | 140 | SVWVDLDFDH | 618 |
| S_PTM | | | | | | |
| CD3_SP11A_BH3_VLK1_ | GFTSKN | 139 | YYDSSK | 140 | YSWDLDFDH | 621 |
| Y_SW | | | | | | |
| CD3_SP11A_VH3_VLK1_ | GFTSKN | 139 | YYDSSK | 140 | SSWDLDFDH | 614 |
| CD3_SP11A_VH3_VLK1_ | GFTFSKQ | 479 | YYDSSK | 140 | YVWVDLDFDH | 626 |
| Y_PTM | | | | | | |
| CD3_SP11A_VH3_VLK1_ | GFTFSKN | 139 | YYDSSK | 140 | SSVVDLDFDH | 614 |
| S_PTM_SW | | | | | | |
| CD3_SP11A_VH3_VLK1_ | GFTFSKN | 139 | YYDSSK | 140 | SSWDLDFDH | 473 |
| S_PTM_SW | | | | | | |
| CD3_SP11A_VH3_VLK1_ | GFTFSKN | 139 | YYDSSK | 140 | FSWDLDFDH | 473 |
| SW | | | | | | |
| CD3_SP11A_VH5_VK2_Y | GFTFSKQ | 479 | YYDSSK | 140 | YVWVDLDFDH | 626 |
| CD3_SP11A_VH5_VK2_S | GFTFSKQ | 479 | YYDSSK | 140 | SVWVDLDFDH | 618 |
| CD3_SP11A_VH5_VK2_Y_ | GFTFSKN | 139 | YYDSSK | 140 | YVWVDLDFDH | 626 |
| PTIV1 | | | | | | |
| CD3_SP11A_VH5_VK2_S_ | GFTFSKN | 139 | YYDSSK | 140 | SVWVDLDFDH | 618 |
| PTM | | | | | | |
| CD3_SP11A_VH5_VK2_Y_ | GFTFSKQ | 479 | YYDSSK | 140 | YSVVDLDFDH | 621 |
| SW | | | | | | |
| CD3_SP11A_VH5_VK2_S_ | GFTFSKQ | 479 | YYDSSK | 140 | SSVVDLDFDH | 614 |
| SW | | | | | | |
| CD3_SP11A_VH5_VK2_Y_ | GFTFSKN | 139 | YYDSSK | 140 | YSVVDLDFDH | 621 |
| SW | | | | | | |
| CD3_SP11A_VH5_VK2_S_ | GFTFSKN | 139 | YYDSSK | 140 | SSVVDLDFDH | 614 |
| PTM_SW | | | | | | |
| CD3_SP11A_VH5_VK2_ | GFTFSKN | 139 | YYDSSK | 140 | FSVVDLDFDH | 473 |
| PTM_SW | | | | | | |
| CD3_SP11A_VH5_VK2_SW | GFTFSKQ | 479 | YYDSSK | 140 | FSVVDLDFDH | 473 |

TABLE 1E-2
CD3 Binders - Light Chain CDR sequences according to Chothia numbering scheme

| | | SEQ ID | | SEQ ID | | SEQ ID |
|---|---|---|---|---|---|---|
| Binder | CDR-L1 | NO: | CDR-L2 | NO: | CDR-L3 | NO: |
| NOV292 | SQSLVRSD | 155 | RVS | 156 | SSHFPW | 157 |
| | GTTY | | | | | |
| NOV123 | SQSLIYSIGN | 187 | RVS | 188 | STHLPY | 189 |
| | TY | | | | | |
| Sp10b | SQSLIYSIGN | 187 | RVS | 156 | STHLPY | 189 |
| | TY | | | | | |
| NOV453 | SQNINNY | 219 | NTD | 220 | HRSRY | 221 |
| NOV229 | SQNINNY | 251 | NTD | 252 | HRSRY | 253 |
| NOV110 | SQSLVYSH | 283 | RVS | 284 | STHLPY | 285 |
| | GNTY | | | | | |
| NOV832 | SQSLVYSH | 315 | RVS | 316 | STHLPY | 317 |
| | GNTY | | | | | |
| NOV589 | SQSLVRSD | 347 | RVS | 348 | SSHFPW | 349 |
| | GTTY | | | | | |
| NOV580 | SQNIDKY | 379 | NTN | 380 | HRSSY | 381 |
| NOV567 | SQSIGNS | 411 | STS | 412 | YATYPY | 413 |
| NOV221 | SQNIDKY | 443 | NTN | 444 | HRSGY | 445 |
| CD3_sp11a_bkm1 | SQSLVRSD | 155 | RVS | 156 | SSHFPW | 157 |
| | GTTY | | | | | |
| CD3_SP11a_bkm2 | SQSLVRSD | 155 | RVS | 156 | SSHFPW | 157 |
| | GTTY | | | | | |
| CD3_sp11a_hz0 | SQSLVRSD | 155 | RVS | 156 | SSHFPW | 157 |
| | GTTY | | | | | |
| CD3_SP11A_HZ1 | SQSLVRSD | 155 | RVS | 156 | SSHFPW | 157 |
| | GTTY | | | | | |
| CD3_sp11a_sansPTM_hz1 | SQSLVRSE | 488 | RVS | 156 | SSHFPW | 157 |
| | GTTY | | | | | |
| CD3_sp11a_sansPTM_rat | SQSLVRSE | 488 | RVS | 156 | SSHFPW | 157 |
| | GTTY | | | | | |
| CD3_sp11a_VHVL_YY | SQSLVRSD | 155 | RVS | 156 | SSHFPW | 157 |
| | GTTY | | | | | |
| CD3_SP11A_VHVL_SS | SQSLVRSD | 155 | RVS | 156 | SSHFPW | 157 |
| | GTTY | | | | | |
| CD3_SP11A_VHVL_WS | SQSLVRSD | 155 | RVS | 156 | SSHFPW | 157 |
| | GTTY | | | | | |
| CD3_sp11a_VHVL_SW | SQSLVRSD | 155 | RVS | 156 | SSHFPW | 157 |
| | GTTY | | | | | |
| CD3_SP11A_VHVL_TT | SQSLVRSD | 155 | RVS | 156 | SSHFPW | 157 |
| | GTTY | | | | | |
| CD3_SP11A_VHVL_TW | SQSLVRSD | 155 | RVS | 156 | SSHFPW | 157 |
| | GTTY | | | | | |
| CD3_SP11A_VHVL_VVT | SQSLVRSD | 155 | RVS | 156 | SSHFPW | 157 |
| | GTTY | | | | | |
| CD3_SP11A VH3_VLK_3 | SQSLVRSE | 488 | RVS | 156 | SSHFPW | 157 |
| | GTTY | | | | | |
| CD3_sp11a_VH1_VK2 | SQSLVRSD | 155 | RVS | 156 | SSHFPW | 157 |
| | GTTY | | | | | |
| CD3_SP11A_VH3_VLK1 | SQSLVRSE | 488 | RVS | 156 | SSHFPW | 157 |
| | GTTY | | | | | |
| CD3_SP11A_VH5_VK2 | SQSLVRSD | 155 | RVS | 156 | SSHFPW | 157 |
| | GTTY | | | | | |
| CD3_sp9aFW1_VL_VH_S5 | SQNINNY | 219 | NTD | 220 | HRSRY | 221 |
| 6G | | | | | | |
| CD3_SP9AFW4_VL_VH_S | SQNINNY | 219 | NTD | 220 | HRSRY | 221 |
| 56G | | | | | | |
| CD3_sp9aFW1_VLVH | SQNINNY | 219 | NTD | 220 | HRSRY | 221 |
| CD3_sp9aFW4_VLVH | SQNINNY | 219 | NTD | 220 | HRSRY | 221 |
| CD3_sp9arabtor_VHVL | SQNINNY | 219 | NTD | 220 | HRSRY | 221 |
| CD3_sp9arabtor_VLVH | SQNINNY | 219 | NTD | 220 | HRSRY | 221 |
| CD3_sp11a_VHVL_YY_SA | SQSLVRSE | 488 | RVS | 156 | SSHFPW | 157 |
| NSPTM | GTTY | | | | | |
| CD3_sp11a_VHVL_YY_SA | SQSLVRSE | 488 | RVS | 156 | SSHFPW | 157 |
| NSPTM_Y | GTTY | | | | | |
| CD3_sp11a_VHVL_YY_SA | SQSLVRSE | 488 | RVS | 156 | SSHFPW | 157 |
| NSPTM_S | GTTY | | | | | |
| CD3_sp11a_VHVL_YY_Y | SQSLVRSD | 155 | RVS | 156 | SSHFPW | 157 |
| | GTTY | | | | | |
| CD3_sp11a_VHVL_YY_s | SQSLVRSD | 155 | RVS | 156 | SSHFPW | 157 |
| | GTTY | | | | | |
| CD3_sp11a_VHVL_SS_SA | SQSLVRSE | 488 | RVS | 156 | SSHFPW | 157 |
| NSPTM | GTTY | | | | | |
| CD3_sp11a_VHVL_SS_SA | SQSLVRSE | 488 | RVS | 156 | SSHFPW | 157 |
| NSPTM_Y | GTTY | | | | | |
| CD3_sp11a_VHVL_SS_SA | SQSLVRSE | 488 | RVS | 156 | SSHFPW | 157 |
| NSPTM_S | GTTY | | | | | |
| CD3_sp11a_VHVL_SS_Y | SQSLVRSD | 155 | RVS | 156 | SSHFPW | 157 |
| | GTTY | | | | | |
| CD3_sp11a_VHVL_SS_S | SQSLVRSD | 155 | RVS | 156 | SSHFPW | 157 |
| | GTTY | | | | | |
| CD3_sp11a_VHVL_SS_ | SQSLVRSE | 488 | RVS | 156 | SSHFPW | 157 |
| SANSPTM | GTTY | | | | | |
| CD3_sp11a_VHVL_WS_ | SQSLVRSE | 488 | RVS | 156 | SSHFPW | 157 |
| SANSPTM_Y | GTTY | | | | | |
| CD3_sp11a_VHVL_WS_ | SQSLVRSE | 488 | RVS | 156 | SSHFPW | 157 |
| SANSPTM_S | GTTY | | | | | |
| CD3_sp11a_VHVL_WS_Y | SQSLVRSD | 155 | RVS | 156 | SSHFPW | 157 |
| | GTTY | | | | | |
| CD3_sp11a_VHVL_WS_S | SQSLVRSD | 155 | RVS | 156 | SSHFPW | 157 |
| | GTTY | | | | | |
| CD3_sp11a_VHVL_WS_ | SQSLVRSE | 488 | RVS | 156 | SSHFPW | 157 |
| SANSPTM | GTTY | | | | | |
| CD3_sp11a_VHVL_SW_ | SQSLVRSE | 488 | RVS | 156 | SSHFPW | 157 |
| SANSPTM_Y | GTTY | | | | | |
| CD3_sp11a_VHVL_SW_ | SQSLVRSE | 488 | RVS | 156 | SSHFPW | 157 |
| SANSPTM_S | GTTY | | | | | |
| CD3_sp11a_VHVL_SW_Y | SQSLVRSD | 155 | RVS | 156 | SSHFPW | 157 |
| | GTTY | | | | | |
| CD3_sp11a_VHVL_SW_S | SQSLVRSD | 155 | RVS | 156 | SSHFPW | 157 |
| | GTTY | | | | | |
| CD3_sp11a_VHVL_SW_ | SQSLVRSE | 488 | RVS | 156 | SSHFPW | 157 |
| SANSPTM | GTTY | | | | | |
| CD3_sp11a_VHVL_TW_ | SQSLVRSE | 488 | RVS | 156 | SSHFPW | 157 |
| SANSPTM_Y | GTTY | | | | | |
| CD3_sp11a_VHVL_TW_ | SQSLVRSE | 488 | RVS | 156 | SSHFPW | 157 |
| SANSPTM_S | GTTY | | | | | |
| CD3_sp11a_VHVL_TW_Y | SQSLVRSD | 155 | RVS | 156 | SSHFPW | 157 |
| | GTTY | | | | | |
| CD3_sp11a_VHVL_TW_S | SQSLVRSD | 155 | RVS | 156 | SSHFPW | 157 |
| | GTTY | | | | | |
| CD3_sp11a_VHVL_TW_ | SQSLVRSE | 488 | RVS | 156 | SSHFPW | 157 |
| SANSPTM | GTTY | | | | | |
| CD3_sp11a_VHVL_TT_ | SQSLVRSE | 488 | RVS | 156 | SSHFPW | 157 |
| SANSPTM_Y | GTTY | | | | | |
| CD3_sp11a_VHVL_TT_SA | SQSLVRSE | 488 | RVS | 156 | SSHFPW | 157 |
| NSPTM_S | GTTY | | | | | |
| CD3_sp11a_VHVL_TT_Y | SQSLVRSD | 155 | RVS | 156 | SSHFPW | 157 |
| | GTTY | | | | | |
| CD3_sp11a_VHVL_TT_S | SQSLVRSD | 155 | RVS | 156 | SSHFPW | 157 |
| | GTTY | | | | | |
| CD3_sp11a_VHVL_TT_SA | SQSLVRSE | 488 | RVS | 156 | SSHFPW | 157 |
| NSPTM | GTTY | | | | | |
| CD3_SP11AVH3_VLK_3_Y | SQSLVRSE | 488 | RVS | 156 | SSHFPW | 157 |
| | GTTY | | | | | |
| CD3_SP11AVH3_VLK_3_S | SQSLVRSE | 488 | RVS | 156 | SSHFPW | 157 |
| | GTTY | | | | | |
| CD3_SP11AVH3_VLK_3_ | SQSLVRSD | 155 | RVS | 156 | SSHFPW | 157 |
| Y_PTM | GTTY | | | | | |
| CD3_SP11AVH3_VLK_3_ | SQSLVRSD | 155 | RVS | 156 | SSHFPW | 157 |
| S_PTM | GTTY | | | | | |
| CD3_SP11AVH3_VLK_3_ | SQSLVRSE | 488 | RVS | 156 | SSHFPW | 157 |
| Y_SW | GTTY | | | | | |
| CD3_SP11AVH3_VLK_3_ | SQSLVRSE | 488 | RVS | 156 | SSHFPW | 157 |
| S_SW | GTTY | | | | | |
| CD3_SP11AVH3_VLK_3_ | SQSLVRSD | 155 | RVS | 156 | SSHFPW | 157 |
| Y_PTM SW | GTTY | | | | | |
| CD3_SP11AVH3_VLK_3_ | SQSLVRSD | 155 | RVS | 156 | SSHFPW | 157 |
| S_SWPTM | GTTY | | | | | |
| CD3_SP11AVH3_VLK_SW | SQSLVRSD | 155 | RVS | 156 | SSHFPW | 157 |
| PTM | GTTY | | | | | |
| CD3_SP11AVH3_VLK_3_SW | SQSLVRSE | 488 | RVS | 156 | SSHFPW | 157 |
| | GTTY | | | | | |
| CD3_sp11a_VH1_VK2_Y | SQSLVRSD | 155 | RVS | 156 | SSHFPW | 157 |
| | GTTY | | | | | |
| CD3_sp11a_VH1_VK2_S | SQSLVRSD | 155 | RVS | 156 | SSHFPW | 157 |
| | GTTY | | | | | |
| CD3_sp11a_VH1_VK2_Y_ | SQSLVRSE | 488 | RVS | 156 | SSHFPW | 157 |
| PTM | GTTY | | | | | |
| CD3_sp11a_VH1_VK2_S_ | SQSLVRSD | 155 | RVS | 156 | SSHFPW | 157 |
| PTM | GTTY | | | | | |
| CD3_sp11a_VH1_VK2_Y_ | SQSLVRSD | 155 | RVS | 156 | SSHFPW | 157 |
| SW | GTTY | | | | | |
| CD3_sp11a_VH1_VK2_S_ | SQSLVRSD | 155 | RVS | 156 | SSHFPW | 157 |
| SW | GTTY | | | | | |
| CD3_sp11a_VH1_VK2_Y_ | SQSLVRSE | 488 | RVS | 156 | SSHFPW | 157 |
| PTM | GTTY | | | | | |
| CD3_sp11a_VH1_VK2_S_ | SQSLVRSD | 155 | RVS | 156 | SSHFPW | 157 |
| PTM_SW | GTTY | | | | | |
| CD3_sp11a_VH1_VK2_SW | SQSLVRSD | 155 | RVS | 156 | SSHFPW | 157 |
| | GTTY | | | | | |
| CD3_sp11a_VH1_VK2_SW_ | SQSLVRSE | 488 | RVS | 156 | SSHFPW | 157 |
| PTM | GTTY | | | | | |
| CD3_SP11A_VH3_VLK1_Y | SQSLVRSE | 488 | RVS | 156 | SSHFPW | 157 |
| | GTTY | | | | | |
| CD3_SP11A_VH3_VLK1_S | SQSLVRSE | 488 | RVS | 156 | SSHFPW | 157 |
| | GTTY | | | | | |
| CD3_SP11A_VH3_VLK1_ | SQSLVRSD | 155 | RVS | 156 | SSHFPW | 157 |
| Y_PTM | GTTY | | | | | |
| CD3_SP11A_VH3_VLK1_ | SQSLVRSD | 155 | RVS | 156 | SSHFPW | 157 |
| S_PTM | GTTY | | | | | |
| CD3_SP11A_VH3_VLK1_ | SQSLVRSE | 488 | RVS | 156 | SSHFPW | 157 |
| Y_SW | GTTY | | | | | |
| CD3_SP11A_VH3_VLK1_ | SQSLVRSE | 488 | RVS | 156 | SSHFPW | 157 |
| S_SW | GTTY | | | | | |
| CD3_SP11A_VH3_VLK1_ | SQSLVRSD | 155 | RVS | 156 | SSHFPW | 157 |
| Y_PTM | GTTY | | | | | |
| CD3_SP11A_VH3_VLK1_ | SQSLVRSD | 155 | RVS | 156 | SSHFPW | 157 |
| S_PTM_SW | GTTY | | | | | |
| CD3_SP11A_VH3_VLK1P | SQSLVRSD | 155 | RVS | 156 | SSHFPW | 157 |
| TM_SW | GTTY | | | | | |
| CD3_SP11A_VH3_VLK1_ | SQSLVRSE | 488 | RVS | 156 | SSHFPW | 157 |
| SW | GTTY | | | | | |
| CD3_SP11A_VH5_VK2_Y | SQSLVRSD | 155 | RVS | 156 | SSHFPW | 157 |
| | GTTY | | | | | |
| CD3_SP11A_VH5_VK2_S | SQSLVRSD | 155 | RVS | 156 | SSHFPW | 157 |
| | GTTY | | | | | |
| CD3_SP11A_VH5_VK2_Y_ | SQSLVRSD | 155 | RVS | 156 | SSHFPW | 157 |
| PTM | GTTY | | | | | |
| CD3_SP11A_VH5_VK2_S_ | SQSLVRSD | 155 | RVS | 156 | SSHFPW | 157 |
| PTM | GTTY | | | | | |
| CD3_SP11A_VH5_VK2_Y_ | SQSLVRSD | 155 | RVS | 156 | SSHFPW | 157 |
| SW | GTTY | | | | | |
| CD3_SP11A_VH5_VK2_S_SW | SQSLVRSD | 155 | RVS | 156 | SSHFPW | 157 |
| | GTTY | | | | | |
| CD3_SP11A_VH5_VK2_Y_ | SQSLVRSD | 155 | RVS | 156 | SSHFPW | 157 |
| PTM_SW | GTTY | | | | | |
| CD3_SP11A_VH5_VK2_S_ | SQSLVRSD | 155 | RVS | 156 | SSHFPW | 157 |
| PTM_SW | GTTY | | | | | |
| CD3_SP11A_VH5_VK2_P | SQSLVRSD | 155 | RVS | 156 | SSHFPW | 157 |
| TM_SW | GTTY | | | | | |
| CD3_SP11A_VH5_VK2_SW | SQSLVRSD | 155 | RVS | 156 | SSHFPW | 157 |
| | GTTY | | | | | |

TABLE 1F-1
CD3 Binders - Heavy Chain CDR sequences according to IMGT numbering scheme

| | | SEQ ID | | SEQ ID | | SEQ ID |
|---|---|---|---|---|---|---|
| Binder | CDR-H1 | NO: | CDR-H2 | NO: | CDR-H3 | NO: |
| NOV292 | GFTFSKN | 142 | IYYDSSKM | 143 | ASFVWVDLDF | 144 |
| | G | | | | DH | |
| NOV123 | GYTFTSY | 174 | IYPGHDAI | 175 | VRPNTMMAP | 176 |
| | Y | | | | LAY | |
| Sp10b | GYTFTSY | 174 | IYPGHDAI | 175 | VRPNTMMAP | 176 |
| | Y | | | | LAY | |
| NOV453 | GFSLTTY | 206 | MRYSGDT | 207 | TSDPMYIPNY | 208 |
| | N | | | | SYGVMNA | |
| NOV229 | GFSLTTY | 238 | MRYSGDT | 239 | ARDPMYIPN | 240 |
| | N | | | | YSYGVMNA | |
| NOV110 | GYTFTSY | 270 | IYPANGGI | 271 | ARPVTMMAP | 272 |
| | Y | | | | LVF | |
| NOV832 | GYTFTSY | 302 | IYPANGGI | 303 | ARPVTMMAP | 304 |
| | Y | | | | LVF | |
| NOV589 | GFTFSKN | 334 | IYYDSSR | 335 | ASFVWVDLDF | 336 |
| | G | | M | | DY | |
| NOV580 | GFSLTTY | 366 | MRYSGDT | 367 | TRDPMYIPG | 368 |
| | N | | | | YSYGVMNA | |
| NOV567 | GFAFRKY | 398 | IYYDSSKM | 399 | AALNSEYD | 400 |
| | G | | | | | |
| NOV221 | GFSLTTY | 430 | MRYSGDT | 431 | TRDPMYIPG | 432 |
| | N | | | | YSYGVMNA | |
| CD3_sp11a_bkm1 | GFTFSKN | 142 | IYYDSSKM | 143 | ASFVWVDLDF | 144 |
| | G | | | | DH | |
| CD3_SP11a_bkm2 | GFTFSKN | 142 | IYYDSSKM | 143 | AKFVWVDLDF | 462 |
| | G | | | | DH | |
| CD3_sp11a_hz0 | GFTFSKN | 142 | IYYDSSKM | 143 | AKFVWVDLDF | 462 |
| | G | | | | DH | |
| CD3_SP11A_HZ1 | GFTFSKN | 142 | IYYDSSKM | 143 | ASFVWVDLDF | 144 |
| | G | | | | DH | |
| CD3_sp11a_sansPTM_hz1 | GFTFSKQ | 480 | IYYDSSKM | 143 | ASFVWVDLDF | 144 |
| | G | | | | DH | |
| CD3_sp11a_sansPTM_rat | GFTFSKQ | 480 | IYYDSSKM | 143 | ASFVWVDLDF | 144 |
| | G | | | | DH | |
| CD3_sp11a_VHVL_YY | GFTFSKN | 142 | IYYDSSKM | 143 | ASFYYDLDF | 470 |
| | G | | | | DH | |
| CD3_SP11A_VHVL_SS | GFTFSKN | 142 | IYYDSSKM | 143 | ASFSSDLDF | 464 |
| | G | | | | DH | |
| CD3_SP11A_VHVL_WS | GFTFSKN | 142 | IYYDSSKM | 143 | ASFWSDLDF | 468 |
| | G | | | | DH | |
| CD3_sp11a_VHVL_SW | GFTFSKN | 142 | IYYDSSKM | 143 | ASFSVVDLDF | 465 |
| | G | | | | DH | |
| CD3_SP11A_VHVL_TT | GFTFSKN | 142 | IYYDSSKM | 143 | ASFTTDLDFD | 466 |
| | G | | | | H | |
| CD3_SP11A_VHVL_TW | GFTFSKN | 142 | IYYDSSKM | 143 | ASFTWDLDF | 467 |
| | G | | | | DH | |
| CD3_SP11A_VHVL_VVT | GFTFSKN | 142 | IYYDSSKM | 143 | ASFVVTDLDF | 469 |
| | G | | | | DH | |
| CD3_SP11A VH3_VLK_3 | GFTFSKN | 142 | IYYDSSKM | 143 | ASFVWVDLDF | 144 |
| | G | | | | DH | |
| CD3_sp11a_VH1_VK2 | GFTFSKQ | 480 | IYYDSSKM | 143 | ASFVWVDLDF | 144 |
| | G | | | | DH | |
| CD3_SP11A_VH3_VLK1 | GFTFSKN | 142 | IYYDSSKM | 143 | ASFVWVDLDF | 144 |
| | G | | | | DH | |
| CD3_SP11A_VH5_VK2 | GFTFSKQ | 480 | IYYDSSKM | 143 | ASFVWVDLDF | 144 |
| | G | | | | DH | |
| CD3_sp9aFW1_VL_VH_S | GFSLTTY | 206 | MRYSGDT | 207 | ASDPMYIPNY | 463 |
| 56G | N | | | | AYGVMNA | |
| CD3_SP9AFW4_VL_VH_S | GFSLTTY | 206 | MRYSGDT | 207 | ASDPMYIPNY | 463 |
| 56G | N | | | | AYGVMNA | |
| CD3_sp9aFW1_VLVH | GFSLTTY | 206 | MRYSGDT | 207 | ASDPMYIPNY | 463 |
| | N | | | | AYGVMNA | |
| CD3_sp9aFW4_VLVH | GFSLTTY | 206 | MRYSGDT | 207 | ASDPMYIPNY | 463 |
| | N | | | | AYGVMNA | |
| CD3_sp9arabtor_VHVL | GFSLTTY | 206 | MRYSGDT | 207 | ASDPMYIPNY | 463 |
| | N | | | | AYGVMNA | |
| CD3_sp9arabtor_VLVH | GFSLTTY | 206 | MRYSGDT | 207 | ASDPMYIPNY | 463 |
| | N | | | | AYGVMNA | |
| CD3_sp11a_VHVL_YY_SA | GFTFSKQ | 480 | IYYDSSKM | 143 | ASFYYDLDF | 470 |
| NSPTM | G | | | | DH | |
| CD3_sp11a_VHVL_YY_SA | GFTFSKQ | 480 | IYYDSSKM | 143 | ASYYYDLDF | 554 |
| NSPTM_Y | G | | | | DH | |
| CD3_sp11a_VHVL_YY_SA | GFTFSKQ | 480 | IYYDSSKM | 143 | ASSYYDLDF | 547 |
| NSPTM_S | G | | | | DH | |
| CD3_sp11a_VHVL_YY_Y | GFTFSKN | 142 | IYYDSSKM | 143 | ASYYYDLDF | 554 |
| | G | | | | DH | |
| CD3_sp11a_VHVL_YY_s | GFTFSKN | 142 | IYYDSSKM | 143 | ASSYYDLDF | 547 |
| | G | | | | DH | |
| CD3_sp11a_VHVL_SS_SA | GFTFSKQ | 480 | IYYDSSKM | 143 | ASFSSDLDF | 464 |
| NSPTM | G | | | | DH | |
| CD3_sp11a_VHVL_SS_SA | GFTFSKQ | 480 | IYYDSSKM | 143 | ASYSSDLDF | 548 |
| NSPTM_Y | G | | | | DH | |
| CD3_sp11a_VHVL_SS_SA | GFTFSKQ | 480 | IYYDSSKM | 143 | ASSSSDLDF | 541 |
| NSPTM_S | G | | | | DH | |
| CD3_sp11a_VHVL_SS_Y | GFTFSKN | 142 | IYYDSSKM | 143 | ASYSSDLDF | 548 |
| | G | | | | DH | |
| CD3_sp11a_VHVL_SS_S | GFTFSKN | 142 | IYYDSSKM | 143 | ASSSSDLDF | 541 |
| | G | | | | DH | |
| CD3_sp11a_VHVL_SS_ | GFTFSKQ | 480 | IYYDSSKM | 143 | ASFSSDLDF | 464 |
| SANSPTM | G | | | | DH | |
| CD3_sp11a_VHVL_WS_ | GFTFSKQ | 480 | IYYDSSKM | 143 | ASYWSDLDF | 552 |
| SANSPTM_Y | G | | | | DH | |
| CD3_sp11a_VHVL_WS_ | GFTFSKQ | 480 | IYYDSSKM | 143 | ASSWSDLDF | 545 |
| SANSPTM_S | G | | | | DH | |
| CD3_sp11a_VHVL_WS_Y | GFTFSKN | 142 | IYYDSSKM | 143 | ASYWSDLDF | 552 |
| | G | | | | DH | |
| CD3_sp11a_VHVL_WS_S | GFTFSKN | 142 | IYYDSSKM | 143 | ASSWSDLDF | 545 |
| | G | | | | DH | |
| CD3_sp11a_VHVL_WS_ | GFTFSKQ | 480 | IYYDSSKM | 143 | ASFWSDLDF | 468 |
| SANSPTM | G | | | | DH | |
| CD3_sp11a_VHVL_SW_ | GFTFSKQ | 480 | IYYDSSKM | 143 | ASYSVVDLDF | 549 |
| SANSPTM_Y | G | | | | DH | |
| CD3_sp11a_VHVL_SW_ | GFTFSKQ | 480 | IYYDSSKM | 143 | ASSSVVDLDF | 542 |
| SANSPTM_S | G | | | | DH | |
| CD3_sp11a_VHVL_SW_Y | GFTFSKN | 142 | IYYDSSKM | 143 | ASYSVVDLDF | 549 |
| | G | | | | DH | |
| CD3_sp11a_VHVL_SW_S | GFTFSKN | 142 | IYYDSSKM | 143 | ASSSVVDLDF | 542 |
| | G | | | | DH | |
| CD3_sp11a_VHVL_SW_ | GFTFSKQ | 480 | IYYDSSKM | 143 | ASFSVVDLDF | 465 |
| SANSPTM | G | | | | DH | |
| CD3_sp11a_VHVL_TW_ | GFTFSKQ | 480 | IYYDSSKM | 143 | ASYTVVDLDF | 551 |
| SANSPTM_Y | G | | | | DH | |
| CD3_sp11a_VHVL_TW_ | GFTFSKQ | 480 | IYYDSSKM | 143 | ASSTVVDLDF | 544 |
| SANSPTM_S | G | | | | DH | |
| CD3_sp11a_VHVL_TW_ | GFTFSKN | 142 | IYYDSSKM | 143 | ASYTVVDLDF | 551 |
| Y | G | | | | DH | |
| CD3_sp11a_VHVL_TW_ | GFTFSKN | 142 | IYYDSSKM | 143 | ASSTVVDLDF | 544 |
| S | G | | | | DH | |
| CD3_sp11a_VHVL_TW_ | GFTFSKQ | 480 | IYYDSSKM | 143 | ASFTWDLDF | 467 |
| SANSPTM | G | | | | DH | |
| CD3_sp11a_VHVL_TT_ | GFTFSKQ | 480 | IYYDSSKM | 143 | ASYTTDLDFD | 550 |
| SANSPTM_Y | G | | | | H | |
| CD3_sp11a_VHVL_TT_SA | GFTFSKQ | 480 | IYYDSSKM | 143 | ASSTTDLDFD | 543 |
| NSPTM_S | G | | | | H | |
| CD3_sp11a_VHVL_TT_Y | GFTFSKN | 142 | IYYDSSKM | 143 | ASYTTDLDFD | 550 |
| | G | | | | H | |
| CD3_sp11a_VHVL_TT_S | GFTFSKN | 142 | IYYDSSKM | 143 | ASSTTDLDFD | 543 |
| | G | | | | H | |
| CD3_sp11a_VHVL_TT_SA | GFTFSKQ | 480 | IYYDSSKM | 143 | ASFTTDLDFD | 466 |
| NSPTM | G | | | | H | |
| CD3_SP11AVH3_VLK_3_ | GFTFSKN | 142 | IYYDSSKM | 143 | ASYVWVDLD | 553 |
| Y | G | | | | DH | |
| CD3_SP11AVH3_VLK_3_ | GFTFSKN | 142 | IYYDSSKM | 143 | ASSVWVDLDF | 546 |
| S | G | | | | DH | |
| CD3_SP11AVH3_VLK_3_ | GFTFSKN | 142 | IYYDSSKM | 143 | ASYVWVDLDF | 553 |
| Y_PTM | G | | | | DH | |
| CD3_SP11AVH3_VLK_3_ | GFTFSKN | 142 | IYYDSSKM | 143 | ASSVWVDLDF | 546 |
| S_PTM | G | | | | DH | |
| CD3_SP11AVH3_VLK_3_ | GFTFSKN | 142 | IYYDSSKM | 143 | ASYSVVDLDF | 549 |
| Y_SW | G | | | | DH | |
| CD3_SP11AVH3_VLK_3_ | GFTFSKN | 142 | IYYDSSKM | 143 | ASSSVVDLDF | 542 |
| S_SW | G | | | | DH | |
| CD3_SP11AVH3_VLK_3_ | GFTFSKN | 142 | IYYDSSKM | 143 | ASYSVVDLDF | 549 |
| Y_PTM_SW | G | | | | DH | |
| CD3_SP11AVH3_VLK_3_ | GFTFSKN | 142 | IYYDSSKM | 143 | ASSSVVDLDF | 542 |
| S_SWPTM | G | | | | DH | |
| CD3 SP11AVH3_VLK_SW | GFTFSKN | 142 | IYYDSSKM | 143 | ASFSVVDLDF | 465 |
| PTM | G | | | | DH | |
| CD3_SP11AVH3_VLK_3_ | GFTFSKN | 142 | IYYDSSKM | 143 | ASFSVVDLDF | 465 |
| SW | G | | | | DH | |
| CD3_sp11a_VH1_VK2_Y | GFTFSKQ | 480 | IYYDSSKM | 143 | ASYVWVDLDF | 553 |
| | G | | | | DH | |
| CD3_sp11a_VH1_VK2_S | GFTFSKQ | 480 | IYYDSSKM | 143 | ASSVWVDLDF | 546 |
| | G | | | | DH | |
| CD3_sp11a_VH1_VK2_Y_ | GFTFSKN | 142 | IYYDSSKM | 143 | ASYVWVDLDF | 553 |
| PTM | G | | | | DH | |
| CD3_sp11a_VH1_VK2_S_ | GFTFSKN | 142 | IYYDSSKM | 143 | ASSVWVDLDF | 546 |
| PTM | G | | | | DH | |
| CD3_sp11a_VH1_VK2_Y_ | GFTFSKQ | 480 | IYYDSSKM | 143 | ASYSVVDLDF | 549 |
| SW | G | | | | DH | |
| CD3_sp11a_VH1_VK2_S_ | GFTFSKQ | 480 | IYYDSSKM | 143 | ASSSVVDLDF | 542 |
| SW | G | | | | DH | |
| CD3_sp11a_VH1_VK2_Y_ | GFTFSKN | 142 | IYYDSSKM | 143 | ASYSVVDLDF | 549 |
| PTM | G | | | | DH | |
| CD3_sp11a_VH1_VK2_S_ | GFTFSKN | 142 | IYYDSSKM | 143 | ASSSVVDLDF | 542 |
| PTM_SW | G | | | | DH | |
| CD3_sp11a_VH1_VK2_S | GFTFSKQ | 480 | IYYDSSKM | 143 | ASFSVVDLDF | 465 |
| W | G | | | | DH | |
| CD3_sp11a_VH1_VK2_S | GFTFSKN | 142 | IYYDSSKM | 143 | ASFSVVDLDF | 465 |
| W_PTM | G | | | | DH | |
| CD3_SP11A_VH3_VLK1_ | GFTFSKN | 142 | IYYDSSKM | 143 | ASYVWVDLDF | 553 |
| Y | G | | | | DH | |
| CD3_SP11A_VH3_VLK1_S | GFTFSKN | 142 | IYYDSSKM | 143 | ASSVWVDLDF | 546 |
| | G | | | | DH | |
| CD3_SP11A_VH3_VLK1_ | GFTFSKQ | 480 | IYYDSSKM | 143 | ASYVWVDLDF | 553 |
| Y_PTM | G | | | | DH | |
| CD3_SP11A_VH3_VLK1_ | GFTFSKQ | 480 | IYYDSSKM | 143 | ASSVWVDLDF | 546 |
| S_PTM | G | | | | DH | |
| CD3_SP11A_VH3_VLK1_ | GFTFSKN | 142 | IYYDSSKM | 143 | ASYSVVDLDF | 549 |
| Y_SW | G | | | | DH | |
| CD3_SP11A_VH3_VLK1_ | GFTFSKN | 142 | IYYDSSKM | 143 | ASSSVVDLDF | 542 |
| S_SW | G | | | | DH | |
| CD3_SP11A_VH3_VLK1_ | GFTFSKQ | 480 | IYYDSSKM | 143 | ASYVWVDLDF | 553 |
| Y_PTM | G | | | | DH | |
| CD3_SP11A_VH3_VLK1_ | GFTFSKQ | 480 | IYYDSSKM | 143 | ASSSVVDLDF | 542 |
| S_PTM_SW | G | | | | DH | |
| CSP_11A_VH3_VLK1P_ | GFTFSKQ | 480 | IYYDSSKM | 143 | ASFSVVDLDF | 465 |
| SW | G | | | | DH | |
| CD3_SP11A_VH3_VLK1_ | GFTFSKN | 142 | IYYDSSKM | 143 | ASFSVVDLDF | 465 |
| SW | G | | | | DH | |
| CD3_SP11A_VH5_VK2_Y | GFTFSKQ | 480 | IYYDSSKM | 143 | ASYVWVDLDF | 553 |
| | G | | | | DH | |
| CD3_SP11A_VH5_VK2_S | GFTFSKQ | 480 | IYYDSSKM | 143 | ASSVWVDLDF | 546 |
| | G | | | | DH | |
| CD3_SP11A_VH5_VK2_Y_ | GFTFSKN | 142 | IYYDSSKM | 143 | ASYVWVDLDF | 553 |
| PTM | G | | | | DH | |
| CD3_SP11A_VH5_VK2_S_ | GFTFSKN | 142 | IYYDSSKM | 143 | ASSVWVDLDF | 546 |
| PTM | G | | | | DH | |
| CD3_SP11A_VH5_VK2_Y_ | GFTFSKQ | 480 | IYYDSSKM | 143 | ASYSVVDLDF | 549 |
| SW | G | | | | DH | |
| CD3_SP11A_VH5_VK2_S_ | GFTFSKQ | 480 | IYYDSSKM | 143 | ASSSVVDLDF | 542 |
| SW | G | | | | DH | |
| CD3_SP11A_VH5_VK2_Y_ | GFTFSKN | 142 | IYYDSSKM | 143 | ASYSVVDLDF | 549 |
| PTM_SW | G | | | | DH | |
| CD3_SP11A_VH5_VK2_S_ | GFTFSKN | 142 | IYYDSSKM | 143 | ASSSVVDLDF | 542 |
| PTM_SW | G | | | | DH | |
| CD3_SP11A_VH5_VK2_P | GFTFSKN | 142 | IYYDSSKM | 143 | ASFSVVDLDF | 465 |
| TM_SW | G | | | | DH | |
| CD3_SP11A_VH5_VK2_S | GFTFSKQ | 480 | IYYDSSKM | 143 | ASFSVVDLDF | 465 |
| W | G | | | | DH | |

TABLE 1F-2
CD3 Binders - Light Chain CDR sequences according to IMGT numbering scheme

| | | SEQ ID | | SEQ ID | | SEQ ID |
|---|---|---|---|---|---|---|
| Binder | CDR-L1 | NO: | CDR-L2 | NO: | CDR-L3 | NO: |
| NOV292 | QSLVRSD | 158 | RVS | 159 | LQSSHF | 160 |
| | GTTY | | | | PWT | |
| NOV123 | QSLIYSIGN | 190 | RVS | 191 | FQSTHL | 192 |
| | TY | | | | PYT | |
| Sp10b | QSLIYSIGN | 190 | RVS | 156 | FQSTHL | 183 |
| | TY | | | | PYT | |
| NOV453 | QNINNY | 222 | NTDHLQA | 223 | LQHRSR | 224 |
| | | | GVP | | YT | |
| NOV229 | QNINNY | 254 | NTDHLQA | 255 | LQHRSR | 256 |
| | | | GVP | | YT | |
| NOV110 | QSLVYSHG | 286 | RVS | 287 | FQSTHL | 288 |
| | NTY | | | | PYT | |
| NOV832 | QSLVYSHG | 318 | RVS | 319 | FQSTHL | 320 |
| | NTY | | | | PYT | |
| NOV589 | QSLVRSD | 350 | RVS | 351 | LQSSHF | 352 |
| | GTTY | | | | PWT | |
| NOV580 | QNIDKY | 382 | NTNNLEA | 383 | LQHRSS | 384 |
| | | | GVP | | YT | |
| NOV567 | QSIGNS | 414 | STSTLEY | 415 | LQYATY | 416 |
| | | | GVP | | PYT | |
| NOV221 | QNIDKY | 446 | NTNNLEA | 447 | LQHRSG | 448 |
| | | | GVP | | YT | |
| CD3_sp11a_bkm1 | QSLVRSD | 158 | RVS | 156 | LQSSHF | 151 |
| | GTTY | | | | PWT | |
| CD3_SP11a_bkm2 | QSLVRSD | 158 | RVS | 156 | LQSSHF | 151 |
| | GTTY | | | | PWT | |
| CD3_sp11a_hz0 | QSLVRSD | 158 | RVS | 156 | LQSSHF | 151 |
| | GTTY | | | | PWT | |
| CD3_SP11A_HZ1 | QSLVRSD | 158 | RVS | 156 | LQSSH | 484 |
| | GTTY | | | | | |
| CD3_sp11a_sansPTM_hz1 | QSLVRSEG | 486 | RVS | 156 | LQSSHF | 151 |
| | TTY | | | | PWT | |
| CD3_sp11a_sansPTM_rat | QSLVRSEG | 486 | RVS | 156 | LQSSHF | 151 |
| | TTY | | | | PWT | |
| CD3_sp11a_VHVL_YY | QSLVRSD | 158 | RVS | 156 | LQSSHF | 151 |
| | GTTY | | | | PWT | |
| CD3_SP11A_VHVL_SS | QSLVRSD | 158 | RVS | 156 | LQSSHF | 151 |
| | GTTY | | | | PWT | |
| CD3_SP11A_VHVL_WS | QSLVRSD | 158 | RVS | 156 | LQSSHF | 151 |
| | GTTY | | | | PWT | |
| CD3_sp11a_VHVL_SW | QSLVRSD | 158 | RVS | 156 | LQSSHF | 151 |
| | GTTY | | | | PWT | |
| CD3_SP11A_VHVL_TT | QSLVRSD | 158 | RVS | 156 | LQSSHF | 151 |
| | GTTY | | | | PWT | |
| CD3_SP11A_VHVL_TW | QSLVRSD | 158 | RVS | 156 | LQSSHF | 151 |
| | GTTY | | | | PWT | |
| CD3_SP11A_VHVL_VVT | QSLVRSD | 158 | RVS | 156 | LQSSHF | 151 |
| | GTTY | | | | PWT | |
| CD3_SP11A VH3_VLK_3 | QSLVRSEG | 486 | RVS | 156 | LQSSHF | 151 |
| | TTY | | | | PWT | |
| CD3_sp11a_VH1_VK2 | QSLVRSD | 158 | RVS | 156 | LQSSHF | 151 |
| | GTTY | | | | PWT | |
| CD3_SP11A_VH3_VLK1 | QSLVRSEG | 486 | RVS | 156 | LQSSHF | 151 |
| | TTY | | | | PWT | |
| CD3_SP11A_VH5_VK2 | QSLVRSD | 158 | RVS | 156 | LQSSHF | 151 |
| | GTTY | | | | PWT | |
| CD3_sp9aFW1_VL_VH_S5 | QNINNY | 222 | NTDHLQA | 223 | LQHRSR | 215 |
| 6G | | | GVP | | YT | |
| CD3_SP9AFW4_VL_VH_S | QNINNY | 222 | NTDHLQA | 223 | LQHRSR | 215 |
| 56G | | | GVP | | YT | |
| CD3_sp9aFW1_VLVH | QNINNY | 222 | NTDHLQA | 223 | LQHRSR | 215 |
| | | | GVP | | YT | |
| CD3_sp9aFW4_VLVH | QNINNY | 222 | NTDHLQA | 223 | LQHRSR | 215 |
| | | | GVP | | YT | |
| CD3_sp9arabtor_VHVL | QNINNY | 222 | NTDHLQA | 223 | LQHRSR | 215 |
| | | | GVP | | YT | |
| CD3_sp9arabtor_VLVH | QNINNY | 222 | NTDHLQA | 223 | LQHRSR | 215 |
| | | | GVP | | YT | |
| CD3_sp11a_VHVL_YY_SA | QSLVRSEG | 486 | RVS | 156 | LQSSHF | 151 |
| NSPTM | TTY | | | | PWT | |
| CD3_sp11a_VHVL_YY_SA | QSLVRSEG | 486 | RVS | 156 | LQSSHF | 151 |
| NSPTM_Y | TTY | | | | PWT | |
| CD3_sp11a_VHVL_YY_SA | QSLVRSEG | 486 | RVS | 156 | LQSSHF | 151 |
| NSPTM_S | TTY | | | | PWT | |
| CD3_sp11a_VHVL_YY_Y | QSLVRSD | 158 | RVS | 156 | LQSSHF | 151 |
| | GTTY | | | | PWT | |
| CD3_sp11a_VHVL_YY_s | QSLVRSD | 158 | RVS | 156 | LQSSHF | 151 |
| | GTTY | | | | PWT | |
| CD3_sp11a_VHVL_SS_SA | QSLVRSEG | 486 | RVS | 156 | LQSSHF | 151 |
| NSPTM | TTY | | | | PWT | |
| CD3_sp11a_VHVL_SS_SA | QSLVRSEG | 486 | RVS | 156 | LQSSHF | 151 |
| NSPTM_Y | TTY | | | | PWT | |
| CD3_sp11a_VHVL_SS_SA | QSLVRSEG | 486 | RVS | 156 | LQSSHF | 151 |
| NSPTM_S | TTY | | | | PWT | |
| CD3_sp11a_VHVL_SS_Y | QSLVRSD | 158 | RVS | 156 | LQSSHF | 151 |
| | GTTY | | | | PWT | |
| CD3_sp11a_VHVL_SS_S | QSLVRSD | 158 | RVS | 156 | LQSSHF | 151 |
| | GTTY | | | | PWT | |
| CD3_sp11a_VHVL_SS_ | QSLVRSEG | 486 | RVS | 156 | LQSSHF | 151 |
| SANSPTM | TTY | | | | PWT | |
| CD3_sp11a_VHVL_WS_ | QSLVRSEG | 486 | RVS | 156 | LQSSHF | 151 |
| SANSPTM_Y | TTY | | | | PWT | |
| CD3_sp11a_VHVL_WS_ | QSLVRSEG | 486 | RVS | 156 | LQSSHF | 151 |
| SANSPTM_S | TTY | | | | PWT | |
| CD3_sp11a_VHVL_WS_Y | QSLVRSD | 158 | RVS | 156 | LQSSHF | 151 |
| | GTTY | | | | PWT | |
| CD3_sp11a_VHVL_WS_S | QSLVRSD | 158 | RVS | 156 | LQSSHF | 151 |
| | GTTY | | | | PWT | |
| CD3_sp11a_VHVL_WS_ | QSLVRSEG | 486 | RVS | 156 | LQSSHF | 151 |
| SANSPTM | TTY | | | | PWT | |
| CD3_sp11a_VHVL_SW_ | QSLVRSEG | 486 | RVS | 156 | LQSSHF | 151 |
| SANSPTM_Y | TTY | | | | PWT | |
| CD3_sp11a_VHVL_SW_ | QSLVRSEG | 486 | RVS | 156 | LQSSHF | 151 |
| SANSPTM_S | TTY | | | | PWT | |
| CD3_sp11a_VHVL_SW_Y | QSLVRSD | 158 | RVS | 156 | LQSSHF | 151 |
| | GTTY | | | | PWT | |
| CD3_sp11a_VHVL_SW_S | QSLVRSD | 158 | RVS | 156 | LQSSHF | 151 |
| | GTTY | | | | PWT | |
| CD3_sp11a_VHVL_SW_ | QSLVRSEG | 486 | RVS | 156 | LQSSHF | 151 |
| SANSPTM | TTY | | | | PWT | |
| CD3_sp11a_VHVL_TW_ | QSLVRSEG | 486 | RVS | 156 | LQSSHF | 151 |
| _SANSPTM_Y | TTY | | | | PWT | |
| CD3_sp11a_VHVL_TW_ | QSLVRSEG | 486 | RVS | 156 | LQSSHF | 151 |
| SANSPTM_S | TTY | | | | PWT | |
| CD3_sp11a_VHVL_TW_Y | QSLVRSD | 158 | RVS | 156 | LQSSHF | 151 |
| | GTTY | | | | PWT | |
| CD3_sp11a_VHVL_TW_S | QSLVRSD | 158 | RVS | 156 | LQSSHF | 151 |
| | GTTY | | | | PWT | |
| CD3_sp11a_VHVL_TW_ | QSLVRSEG | 486 | RVS | 156 | LQSSHF | 151 |
| SANSPTM | TTY | | | | PWT | |
| CD3_sp11a_VHVL_TT_ | QSLVRSEG | 486 | RVS | 156 | LQSSHF | 151 |
| SANSPTM_Y | TTY | | | | PWT | |
| CD3_sp11a_VHVL_TT_SA | QSLVRSEG | 486 | RVS | 156 | LQSSHF | 151 |
| NSPTM_S | TTY | | | | PWT | |
| CD3_sp11a_VHVL_TT_Y | QSLVRSD | 158 | RVS | 156 | LQSSHF | 151 |
| | GTTY | | | | PWT | |
| CD3_sp11a_VHVL_TT_S | QSLVRSD | 158 | RVS | 156 | LQSSHF | 151 |
| | GTTY | | | | PWT | |
| CD3_sp11a_VHVL_TT_SA | QSLVRSEG | 486 | RVS | 156 | LQSSHF | 151 |
| NSPTM | TTY | | | | PWT | |
| CD3_SP11AVH3_VLK_3_Y | QSLVRSEG | 486 | RVS | 156 | LQSSHF | 151 |
| | TTY | | | | PWT | |
| CD3_SP11AVH3_VLK_3_S | QSLVRSEG | 486 | RVS | 156 | LQSSHF | 151 |
| | TTY | | | | PWT | |
| CD3_SP11AVH3_VLK_3_Y_ | QSLVRSD | 158 | RVS | 156 | LQSSHF | 151 |
| PTM | GTTY | | | | PWT | |
| CD3_SP11AVH3_VLK_3_S_ | QSLVRSD | 158 | RVS | 156 | LQSSHF | 151 |
| PTM | GTTY | | | | PWT | |
| CD3_SP11AVH3_VLK_3_Y_ | QSLVRSEG | 486 | RVS | 156 | LQSSHF | 151 |
| SW | TTY | | | | PWT | |
| CD3_SP11AVH3_VLK_3_S_ | QSLVRSEG | 486 | RVS | 156 | LQSSHF | 151 |
| SW | TTY | | | | PWT | |
| CD3_SP11AVH3_VLK_3_Y_ | QSLVRSD | 158 | RVS | 156 | LQSSHF | 151 |
| PTM_SW | GTTY | | | | PWT | |
| CD3_SP11AVH3_VLK_3_S_ | QSLVRSD | 158 | RVS | 156 | LQSSHF | 151 |
| SVVPTM | GTTY | | | | PWT | |
| CD3_SP11AVH3_VLK_SW | QSLVRSD | 158 | RVS | 156 | LQSSHF | 151 |
| PTM | GTTY | | | | PWT | |
| CD3_SP11AVH3_VLK_3_SW | QSLVRSEG | 486 | RVS | 156 | LQSSHF | 151 |
| | TTY | | | | PWT | |
| CD3_sp11a_VH1_VK2_Y | QSLVRSD | 158 | RVS | 156 | LQSSHF | 151 |
| | GTTY | | | | PWT | |
| CD3_sp11a_VH1_VK2_S | QSLVRSD | 158 | RVS | 156 | LQSSHF | 151 |
| | GTTY | | | | PWT | |
| CD3_sp11a_VH1_VK2_Y_P | QSLVRSEG | 486 | RVS | 156 | LQSSHF | 151 |
| TM | TTY | | | | PWT | |
| CD3_sp11a_VH1_VK2_S_P | QSLVRSEG | 486 | RVS | 156 | LQSSHF | 151 |
| TM | TTY | PWT | | | | |
| CD3_sp11a_VH1_VK2_Y_SW | QSLVRSD | 158 | RVS | 156 | LQSSHF | 151 |
| | GTTY | | | | PWT | |
| CD3_sp11a_VH1_VK2_S_SW | QSLVRSD | 158 | RVS | 156 | LQSSHF | 151 |
| | GTTY | | | | PWT | |
| CD3_sp11a_VH1_VK2_Y_P | QSLVRSEG | 486 | RVS | 156 | LQSSHF | 151 |
| TM | TTY | | | | PWT | |
| CD3_sp11a_VH1_VK2_S_P | QSLVRSEG | 486 | RVS | 156 | LQSSHF | 151 |
| TM_SW | TTY | | | | PWT | |
| CD3_sp11a_VH1_VK2_SW | QSLVRSD | 158 | RVS | 156 | LQSSHF | 151 |
| | GTTY | | | | PWT | |
| CD3_sp11a_VH1_VK2_SW_ | QSLVRSDE | 568 | RVS | 156 | LQSSHF | 151 |
| PTM | TTY | | | | PWT | |
| CD3_SP11A_VH3_VLK1_Y | QSLVRSEG | 486 | RVS | 156 | LQSSHF | 151 |
| | TTY | | | | PWT | |
| CD3_SP11A_VH3_VLK1_S | QSLVRSEG | 486 | RVS | 156 | LQSSHF | 151 |
| | TTY | | | | PWT | |
| CD3_SP11A_VH3_VLK1_Y_ | QSLVRSD | 158 | RVS | 156 | LQSSHF | 151 |
| PTM | GTTY | | | | PWT | |
| CD3_SP11A_VH3_VLK1_S_ | QSLVRSD | 158 | RVS | 156 | LQSSHF | 151 |
| PTM | GTTY | | | | PWT | |
| CD3_SP11A_VH3_VLK1_Y_ | QSLVRSEG | 486 | RVS | 156 | LQSSHF | 151 |
| SW | TTY | | | | PWT | |
| CD3_SP11A_VH3_VLK1_S_ | QSLVRSEG | 486 | RVS | 156 | LQSSHF | 151 |
| SW | TTY | | | | PWT | |
| CD3_SP11A_VH3_VLK1_Y_ | QSLVRSD | 158 | RVS | 156 | LQSSHF | 151 |
| PTM | GTTY | | | | PWT | |
| CD3_SP11A_VH3_VLK1_S_ | QSLVRSD | 158 | RVS | 156 | LQSSHF | 151 |
| PTM_SW | GTTY | | | | PWT | |
| CD3_SP11A_VH3_VLK1PT | QSLVRSD | 158 | RVS | 156 | LQSSHF | 151 |
| M_SW | GTTY | | | | PWT | |
| CD3_SP11A_VH3_VLK1_SW | QSLVRSEG | 486 | RVS | 156 | LQSSHF | 151 |
| | TTY | | | | PWT | |
| CD3_SP11A_VH5_VK2_Y | QSLVRSD | 158 | RVS | 156 | LQSSHF | 151 |
| | GTTY | | | | PWT | |
| CD3_SP11A_VH5_VK2_S | QSLVRSD | 158 | RVS | 156 | LQSSHF | 151 |
| | GTTY | | | | PWT | |
| CD3_SP11A_VH5_VK2_Y_ | QSLVRSD | 158 | RVS | 156 | LQSSHF | 151 |
| PTM | GTTY | | | | PWT | |
| CD3_SP11A_VH5_VK2_S_ | QSLVRSD | 158 | RVS | 156 | LQSSHF | 151 |
| PTM | GTTY | | | | PWT | |
| CD3_SP11A_VH5_VK2_Y_ | QSLVRSD | 158 | RVS | 156 | LQSSHF | 151 |
| SW | GTTY | | | | PWT | |
| CD3_SP11A_VH5_VK2_S_ | QSLVRSD | 158 | RVS | 156 | LQSSHF | 151 |
| SW | GTTY | | | | PWT | |
| CD3_SP11A_VH5_VK2_Y_ | QSLVRSD | 158 | RVS | 156 | LQSSHF | 151 |
| PTM_SW | GTTY | | | | PWT | |
| CD3_SP11A_VH5_VK2_S_ | QSLVRSD | 158 | RVS | 156 | LQSSHF | 151 |
| PTM_SW | GTTY | | | | PWT | |
| CD3_SP11A_VH5_VK2_PT | QSLVRSD | 158 | RVS | 156 | LQSSHF | 151 |
| M_SW | GTTY | | | | PWT | |
| CD3_SP11A_VH5_VK2_SW | QSLVRSD | 158 | RVS | 156 | LQSSHF | 151 |
| | GTTY | | | | PWT | |

TABLE 1G-1
CD3 Binders-Heavy Chain CDR sequences according to combination of Kabat and
Chothia numbering schemes

| | | SEQ ID | | SEQ ID | | SEQ ID |
|---|---|---|---|---|---|---|
| Binder | CDR-H1 | NO: | CDR-H2 | NO: | CDR-H3 | NO: |
| NOV292 | GFTFSK | 133 | MIYYDSSKMY | 134 | FVWVDLDFD | 135 |
| | NGMH | | YADTVKG | | H | |
| NOV123 | GYTFTS | 165 | YIYPGHDAIYY | 166 | PNTMMAPLA | 167 |
| | YYIY | | SENFKG | | Y | |
| Sp10b | GYTFTS | 165 | YIYPGHDAIYY | 166 | PNTMMAPLA | 167 |
| | YYIY | | SENFKG | | Y | |
| NOV453 | GFSLTT | 197 | RMRYSGDTSF | 198 | DPMYIPNYS | 199 |
| | YNVH | | NAALTS | | YGVMNA | |
| NOV229 | GFSLTT | 229 | RMRYSGDTSF | 230 | DPMYIPNYS | 231 |
| | YNVH | | NAALTS | | YGVMNA | |
| NOV110 | GYTFTS | 261 | YIYPANGGIYY | 262 | PVTMMAPLV | 263 |
| | YYIY | | SEKFKG | | F | |
| NOV832 | GYTFTS | 293 | YIYPANGGIYY | 294 | PVTMMAPLV | 295 |
| | YYIY | | SEKFKG | | F | |
| NOV589 | GFTFSK | 325 | MIYYDSSRMY | 326 | FVWVDLDFDY | 327 |
| | NGMH | | YADTVKG | | | |
| NOV580 | GFSLTT | 357 | RMRYSGDTSY | 358 | DPMYIPGYS | 359 |
| | YNIH | | SSALKS | | YGVMNA | |
| NOV567 | GFAFRK | 389 | LIYYDSSKMNY | 390 | LNSEYD | 391 |
| | YGMS | | ADTVKG | | | |
| NOV221 | GFSLTT | 421 | RMRYSGDTSY | 422 | DPMYIPGYS | 423 |
| | YNIH | | SSALKS | | YGVMNA | |
| CD3_sp11a_bkm1 | GFTFSK | 133 | MIYYDSSKMY | 134 | FVWVDLDFD | 135 |
| | NGMH | | YADTVKG | | H | |
| CD3_SP11a_bkm2 | GFTFSK | 133 | MIYYDSSKMY | 134 | FVWVDLDFD | 135 |
| | NGMH | | YADTVKG | | H | |
| CD3_sp11a_hz0 | GFTFSK | 133 | MIYYDSSKMY | 134 | FVWVDLDFD | 135 |
| | NGMH | | YADTVKG | | H | |
| CD3_SP11A_HZ1 | GFTFSK | 133 | MIYYDSSKMY | 134 | FVWVDLDFD | 135 |
| | NGMH | | YADTVKG | | H | |
| CD3_sp11a_sansPTM_h | GFTFSK | 481 | MIYYDSSKMY | 134 | FVWVDLDFD | 135 |
| z1 | QGMH | | YADTVKG | | H | |
| CD3 sp11a_sansPTM_r | GFTFSK | 481 | MIYYDSSKMY | 134 | FVWVDLDFD | 135 |
| at | QGMH | | YADTVKG | | H | |
| CD3_sp11a_VHVL_YY | GFTFSK | 133 | MIYYDSSKMY | 134 | FYYDLDFDH | 478 |
| | NGMH | | YADTVKG | | | |
| CD3_SP11A_VHVL_SS | GFTFSK | 133 | MIYYDSSKMY | 134 | FSSDLDFDH | 472 |
| | NGMH | | YADTVKG | | | |
| CD3_SP11A_VHVL_WS | GFTFSK | 133 | MIYYDSSKMY | 134 | FWSDLDFDH | 476 |
| | NGMH | | YADTVKG | | | |
| CD3_sp11a_VHVL_SW | GFTFSK | 133 | MIYYDSSKMY | 134 | FSVVDLDFDH | 473 |
| | NGMH | | YADTVKG | | | |
| CD3_SP11A_VHVL_TT | GFTFSK | 133 | MIYYDSSKMY | 134 | FTTDLDFDH | 474 |
| | NGMH | | YADTVKG | | | |
| CD3_SP11A_VHVL_TW | GFTFSK | 133 | MIYYDSSKMY | 134 | FTWDLDFDH | 475 |
| | NGMH | | YADTVKG | | | |
| CD3_SP11A_VHVL_VVT | GFTFSK | 133 | MIYYDSSKMY | 134 | FVVTDLDFDH | 477 |
| | NGMH | | YADTVKG | | | |
| CD3_SP11A | GFTFSK | 133 | MIYYDSSKMY | 134 | FVWVDLDFD | 135 |
| VH3_VLK_3 | NGMH | | YADTVKG | | H | |
| CD3_sp11a_VH1_VK2 | GFTFSK | 481 | MIYYDSSKMY | 134 | FVWVDLDFD | 135 |
| | QGMH | | YADTVKG | | H | |
| CD3_SP11A_VH3_VLK1 | GFTFSK | 133 | MIYYDSSKMY | 134 | FVWVDLDFD | 135 |
| | NGMH | | YADTVKG | | H | |
| CD3_SP11A_VH5_VK2 | GFTFSK | 481 | MIYYDSSKMY | 134 | FVWVDLDFD | 135 |
| | QGMH | | YADTVKG | | H | |
| CD3_sp9aFW1_VL_VH_ | GFSLTT | 197 | RMRYSGDTSF | 198 | DPMYIPNYA | 471 |
| S56G | YNVH | | NAALTS | | YGVMNA | |
| CD3_SP9AFW4_VL_VH_ | GFSLTT | 197 | RMRYSGDTSF | 198 | DPMYIPNYA | 471 |
| S56G | YNVH | | NAALTS | | YGVMNA | |
| CD3_sp9aFW1_VLVH | GFSLTT | 197 | RMRYSGDTSF | 198 | DPMYIPNYA | 471 |
| | YNVH | | NAALTS | | YGVMNA | |
| CD3_sp9aFW4_VLVH | GFSLTT | 197 | RMRYSGDTSF | 198 | DPMYIPNYA | 471 |
| | YNVH | | NAALTS | | YGVMNA | |
| CD3_sp9arabtor_VHVL | GFSLTT | 197 | RMRYSGDTSF | 198 | DPMYIPNYA | 471 |
| | YNVH | | NAALTS | | YGVMNA | |
| CD3_sp9arabtor VLVH | GFSLTT | 197 | RMRYSGDTSF | 198 | DPMYIPNYA | 471 |
| | YNVH | | NAALTS | | YGVMNA | |
| CD3_sp11a_VHVL_YY_ | GFTFSK | 481 | MIYYDSSKMY | 134 | FVWVDLDFD | 135 |
| SAN_SPTM | QGMH | | YADTVKG | | H | |
| CD3_sp11a_VHVL_YY_ | GFTFSK | 481 | MIYYDSSKMY | 134 | FVWVDLDFD | 135 |
| SANSPTM_Y | QGMH | | YADTVKG | | H | |
| CD3_sp11a_VHVL_YY_ | GFTFSK | 481 | MIYYDSSKMY | 134 | FVWVDLDFD | 135 |
| SANSPTM_S | QGMH | | YADTVKG | | H | |
| CD3_sp11a_VHVL_YY_Y | GFTFSK | 133 | MIYYDSSKMY | 134 | FVWVDLDFD | 135 |
| | NGMH | | YADTVKG | | H | |
| CD3_sp11a_VHVL_YY_S | GFTFSK | 133 | MIYYDSSKMY | 134 | FVWVDLDFD | 135 |
| | NGMH | | YADTVKG | | H | |
| CD3_sp11a_VHVL_SS_ | GFTFSK | 481 | MIYYDSSKMY | 134 | FVWVDLDFD | 135 |
| SANSPTM | QGMH | | YADTVKG | | H | |
| CD3_sp11a_VHVL_SS_ | GFTFSK | 481 | MIYYDSSKMY | 134 | FVWVDLDFD | 135 |
| SANSPTM_Y | QGMH | | YADTVKG | | H | |
| CD3_sp11a_VHVL_SS_ | GFTFSK | 481 | MIYYDSSKMY | 134 | FVWVDLDFD | 135 |
| SANSPTM_S | QGMH | | YADTVKG | | H | |
| CD3_sp11a_VHVL_SS_Y | GFTFSK | 133 | MIYYDSSKMY | 134 | FVWVDLDFD | 135 |
| | NGMH | | YADTVKG | | H | |
| CD3_sp11a_VHVL_SS_S | GFTFSK | 133 | MIYYDSSKMY | 134 | FVWVDLDFD | 135 |
| | NGMH | | YADTVKG | | H | |
| CD3_sp11a_VHVL_SS_ | GFTFSK | 481 | MIYYDSSKMY | 134 | FVWVDLDFD | 135 |
| SANSPTM | QGMH | | YADTVKG | | H | |
| CD3_sp11a_VHVL_WS_ | GFTFSK | 481 | MIYYDSSKMY | 134 | FVWVDLDFD | 135 |
| SANSPTM_Y | QGMH | | YADTVKG | | H | |
| CD3_sp11a_VHVL_WS_ | GFTFSK | 481 | MIYYDSSKMY | 134 | FVWVDLDFD | 135 |
| SANSPTM_S | QGMH | | YADTVKG | | H | |
| CD3_sp11a_VHVL_WS_ | GFTFSK | 133 | MIYYDSSKMY | 134 | FVWVDLDFD | 135 |
| Y | NGMH | | YADTVKG | | H | |
| CD3_sp11a_VHVL_WS_ | GFTFSK | 133 | MIYYDSSKMY | 134 | FVWVDLDFD | 135 |
| S | NGMH | | YADTVKG | | H | |
| CD3_sp11a_VHVL_WS_ | GFTFSK | 481 | MIYYDSSKMY | 134 | FVWVDLDFD | 135 |
| SANSPTM | QGMH | | YADTVKG | | H | |
| CD3_sp11a_VHVL_SW_ | GFTFSK | 481 | MIYYDSSKMY | 134 | FVWVDLDFD | 135 |
| SANSPTM _Y | QGMH | | YADTVKG | | H | |
| CD3_sp11a_VHVL_SW_ | GFTFSK | 481 | MIYYDSSKMY | 134 | FVWVDLDFD | 135 |
| SANSPTM _S | QGMH | | YADTVKG | | H | |
| CD3_sp11a_VHVL_SW_ | GFTFSK | 133 | MIYYDSSKMY | 134 | FVWVDLDFD | 135 |
| Y | NGMH | | YADTVKG | | H | |
| CD3_sp11a_VHVL_SW_ | GFTFSK | 133 | MIYYDSSKMY | 134 | FVWVDLDFD | 135 |
| S | NGMH | | YADTVKG | | H | |
| CD3_sp11a_VHVL_SW_ | GFTFSK | 481 | MIYYDSSKMY | 134 | FVWVDLDFD | 135 |
| SANSPTM | QGMH | | YADTVKG | | H | |
| CD3_sp11a_VHVL_TW_ | GFTFSK | 481 | MIYYDSSKMY | 134 | FVWVDLDFD | 135 |
| SANSPTM _Y | QGMH | | YADTVKG | | H | |
| CD3_sp11a_VHVL_TW_ | GFTFSK | 481 | MIYYDSSKMY | 134 | FVWVDLDFD | 135 |
| SANSPTM _S | QGMH | | YADTVKG | | H | |
| CD3_sp11a_VHVL_TW_ | GFTFSK | 133 | MIYYDSSKMY | 134 | FVWVDLDFD | 135 |
| Y | NGMH | | YADTVKG | | H | |
| CD3_sp11a_VHVL_TW_ | GFTFSK | 133 | MIYYDSSKMY | 134 | FVWVDLDFD | 135 |
| S | NGMH | | YADTVKG | | H | |
| CD3_sp11a_VHVL_TW_ | GFTFSK | 481 | MIYYDSSKMY | 134 | FVWVDLDFD | 135 |
| SANSPTM | QGMH | | YADTVKG | | H | |
| CD3_sp11a_VHVL_TT_ | GFTFSK | 481 | MIYYDSSKMY | 134 | FVWVDLDFD | 135 |
| SANSPTM _Y | QGMH | | YADTVKG | | H | |
| CD3_sp11a_VHVL_TT_ | GFTFSK | 481 | MIYYDSSKMY | 134 | FVWVDLDFD | 135 |
| SANSPTM_S | QGMH | | YADTVKG | | H | |
| CD3_sp11a_VHVL_TT_ | GFTFSK | 133 | MIYYDSSKMY | 134 | FVWVDLDFD | 135 |
| Y | NGMH | | YADTVKG | | H | |
| CD3_sp11a_VHVL_TT_ | GFTFSK | 133 | MIYYDSSKMY | 134 | FVWVDLDFD | 135 |
| S | NGMH | | YADTVKG | | H | |
| CD3_sp11a_VHVL_TT_ | GFTFSK | 481 | MIYYDSSKMY | 134 | FVWVDLDFD | 567 |
| SANSPTM | QGMH | | YADTVKG | | H | |
| CD3_SP11AVH3_VLK_3_ | GFTFSK | 133 | MIYYDSSKMY | 134 | YVWVDLDFD | 626 |
| Y | NGMH | | YADTVKG | | H | |
| CD3_SP11AVH3_VLK_3_ | GFTFSK | 133 | MIYYDSSKMY | 134 | SVWVDLDFD | 618 |
| S | NGMH | | YADTVKG | | H | |
| CD3_SP11AVH3_VLK_3 | GFTFSK | 133 | MIYYDSSKMY | 134 | YVWVDLDFD | 626 |
| Y_PTM | NGMH | | YADTVKG | | H | |
| CD3_SP11AVH3_VLK_3_ | GFTFSK | 133 | MIYYDSSKMY | 134 | SVWVDLDFD | 618 |
| S_PTM | NGMH | | YADTVKG | | H | |
| CD3_SP11AVH3_VLK_3 | GFTFSK | 133 | MIYYDSSKMY | 134 | YSWDLDFDH | 621 |
| Y_SW | NGMH | | YADTVKG | | | |
| CD3_SP11AVH3_VLK_3_ | GFTFSK | 133 | MIYYDSSKMY | 134 | SSWDLDFDH | 614 |
| SW | NGMH | | YADTVKG | | | |
| CD3_SP11AVH3_VLK_3_ | GFTFSK | 133 | MIYYDSSKMY | 134 | YSWDLDFDH | 621 |
| _Y_PTM_SW | NGMH | | YADTVKG | | | |
| CD3_SP11AVH3_VLK_3_ | GFTFSK | 133 | MIYYDSSKMY | 134 | SSWDLDFDH | 614 |
| S_SVVPTM | NGMH | | YADTVKG | | | |
| CD3_SP11AVH3_VLK_S | GFTFSK | 133 | MIYYDSSKMY | 134 | FSVVDLDFDH | 473 |
| | VVPTM | | NGMH | | YADTVKG | |
| CD3_SP11AVH3_VLK_3_ | GFTFSK | 133 | MIYYDSSKMY | 134 | FSVVDLDFDH | 473 |
| SW | NGMH | | YADTVKG | | | |
| CD3_sp11a_VH1_VK2_ | GFTFSK | 481 | MIYYDSSKMY | 134 | YVWVDLDFD | 626 |
| Y | QGMH | | YADTVKG | | H | |
| CD3_sp11a_VH1_VK2_ | GFTFSK | 481 | MIYYDSSKMY | 134 | SVWVDLDFD | 618 |
| S | QGMH | | YADTVKG | | H | |
| CD3_sp11a_VH1_VK2_ | GFTFSK | 133 | MIYYDSSKMY | 134 | YVWVDLDFD | 626 |
| Y_PTM | NGMH | | YADTVKG | | H | |
| CD3_sp11a_VH1_VK2_ | GFTFSK | 133 | MIYYDSSKMY | 134 | SVWVDLDFD | 618 |
| S_PTM | NGMH | | YADTVKG | | H | |
| CD3_sp11a_VH1_VK2_ | GFTFSK | 481 | MIYYDSSKMY | 134 | YSWDLDFDH | 621 |
| Y_SW | QGMH | | YADTVKG | | | |
| CD3_sp11a_VH1_VK2_ | GFTFSK | 481 | MIYYDSSKMY | 134 | SSWDLDFDH | 614 |
| S_SW | QGMH | | YADTVKG | | | |
| CD3_sp11a_VH1_VK2_ | GFTFSK | 133 | MIYYDSSKMY | 134 | YSWDLDFDH | 621 |
| Y_PTM | NGMH | | YADTVKG | | | |
| CD3_sp11a_VH1_VK2_ | GFTFSK | 133 | MIYYDSSKMY | 134 | SSWDLDFDH | 614 |
| S_PTM_SW | NGMH | | YADTVKG | | | |
| CD3_sp11a_VH1_VK2_ | GFTFSK | 481 | MIYYDSSKMY | 134 | FSVVDLDFDH | 473 |
| SW | QGMH | | YADTVKG | | | |
| CD3_sp11a_VH1_VK2_ | GFTFSK | 133 | MIYYDSSKMY | 134 | FSVVDLDFDH | 473 |
| SW PTM | NGMH | | YADTVKG | | | |
| CD3_SP11A_VH3_VLK1_ | GFTFSK | 133 | MIYYDSSKMY | 134 | YVWVDLDFD | 626 |
| Y | NGMH | | YADTVKG | | H | |
| CD3_SP11A_VH3_VLK1_ | GFTFSK | 133 | MIYYDSSKMY | 134 | SVWVDLDFD | 618 |
| S | NGMH | | YADTVKG | | H | |
| CD3_SP11A_VH3_VLK1_ | GFTFSK | 481 | MIYYDSSKMY | 134 | YVWVDLDFD | 626 |
| Y_PTM | QGMH | | YADTVKG | | H | |
| CD3_SP11A_VH3_VLK1_ | GFTFSK | 481 | MIYYDSSKMY | 134 | SVWVDLDFD | 618 |
| S_PTM | QGMH | | YADTVKG | | H | |
| CD3_SP11A_VH3_VLK1_ | GFTFSK | 133 | MIYYDSSKMY | 134 | YSWDLDFDH | 621 |
| Y_SW | NGMH | | YADTVKG | | | |
| CD3_SP11A_VH3_VLK1_ | GFTFSK | 133 | MIYYDSSKMY | 134 | SSWDLDFDH | 614 |
| S_SW | NGMH | | YADTVKG | | | |
| CD3_SP11A_VH3_VLK1_ | GFTFSK | 481 | MIYYDSSKMY | 134 | YVWVDLDFD | 626 |
| Y_PTM | QGMH | | YADTVKG | | H | |
| CD3_SP11A_VH3_VLK1_ | GFTFSK | 481 | MIYYDSSKMY | 134 | SSWDLDFDH | 614 |
| S_PTM_SW | QGMH | | YADTVKG | | | |
| CD3_SP11A_VH3_VLK1 | GFTFSK | 481 | MIYYDSSKMY | 134 | FSVVDLDFDH | 473 |
| PTM_SW | QGMH | | YADTVKG | | | |
| CD3_SP11A_VH3_VLK1_ | GFTFSK | 133 | MIYYDSSKMY | 134 | FSVVDLDFDH | 473 |
| SW | NGMH | | YADTVKG | | | |
| CD3_SP11A_VH5_VK2_ | GFTFSK | 481 | MIYYDSSKMY | 134 | YVWVDLDFD | 626 |
| Y | QGMH | | YADTVKG | | H | |
| CD3_SP11A_VH5_VK2_ | GFTFSK | 481 | MIYYDSSKMY | 134 | SVWVDLDFD | 618 |
| S | QGMH | | YADTVKG | | H | |
| CD3_SP11A_VH5_VK2_ | GFTFSK | 133 | MIYYDSSKMY | 134 | YVWVDLDFD | 626 |
| Y_PTM | NGMH | | YADTVKG | | H | |
| CD3_SP11A_VH5_VK2_ | GFTFSK | 133 | MIYYDSSKMY | 134 | SVWVDLDFD | 618 |
| S_PTM | NGMH | | YADTVKG | | H | |
| CD3_SP11A_VH5_VK2_ | GFTFSK | 481 | MIYYDSSKMY | 134 | YSWDLDFDH | 621 |
| Y_SW | QGMH | | YADTVKG | | | |
| CD3_SP11A_VH5_VK2_ | GFTFSK | 481 | MIYYDSSKMY | 134 | SSWDLDFDH | 614 |
| S_SW | QGMH | | YADTVKG | | | |
| CD3_SP11A_VH5_VK2_ | GFTFSK | 133 | MIYYDSSKMY | 134 | YSWDLDFDH | 621 |
| Y_PTM_SW | NGMH | | YADTVKG | | | |
| CD3_SP11A_VH5_VK2_ | GFTFSK | 133 | MIYYDSSKMY | 134 | SSWDLDFDH | 614 |
| S_PTM_SW | NGMH | | YADTVKG | | | |
| CD3_SP11A_VH5_VK2_ | GFTFSK | 133 | MIYYDSSKMY | 134 | FSVVDLDFDH | 473 |
| PTM_SW | NGMH | | YADTVKG | | | |
| CD3_SP11A_VH5_VK2_ | GFTFSK | 481 | MIYYDSSKMY | 134 | FSVVDLDFDH | 473 |
| SW | QGMH | | YADTVKG | | | |

TABLE 1G-2
CD3 Binders - Light Chain CDR sequences according to combination of Kabat
and Chothia numbering schemes

| | | SEQ ID | CDR- | SEQ ID | | SEQ ID |
|---|---|---|---|---|---|---|
| Binder | CDR-L1 | NO: | L2 | NO: | CDR-L3 | NO: |
| NOV292 | RSSQSLVRSDG | 149 | RVSN | 150 | LQSSHFP | 151 |
| | TTYFN | | RFS | | WT | |
| NOV123 | RSSQSLIYSIGN | 181 | RVSN | 182 | FQSTHLP | 183 |
| | TYLH | | RFS | | YT | |
| Sp10b | RSSQSLIYSIGN | 181 | RVSN | 150 | FQSTHLP | 183 |
| | TYLH | | RFS | | YT | |
| NOV453 | KASQNINNYLN | 213 | NTDHL | 214 | LQHRSRY | 215 |
| | | | QA | | T | |
| NOV229 | KASQNINNYLN | 245 | NTDHL | 246 | LQHRSRY | 247 |
| | | | QA | | T | |
| NOV110 | RSSQSLVYSHG | 277 | RVSN | 278 | FQSTHLP | 279 |
| | NTYLH | | RFS | | YT | |
| NOV832 | RSSQSLVYSHG | 309 | RVSN | 310 | FQSTHLP | 311 |
| | NTYLH | | RFS | | YT | |
| NOV589 | RSSQSLVRSDG | 341 | RVSN | 342 | LQSSHFP | 343 |
| | TTYFN | | RFS | | WT | |
| NOV580 | KTSQNIDKYLN | 373 | NTNNL | 374 | LQHRSSY | 375 |
| | | | EA | | T | |
| NOV567 | RGSQSIGNSLN | 405 | STSTL | 406 | LQYATYP | 407 |
| | | | EY | | YT | |
| NOV221 | KSSQNIDKYLN | 437 | NTNNL | 438 | LQHRSGY | 439 |
| | | | EA | | T | |
| CD3_sp11a_bkm1 | RSSQSLVRSDG | 149 | RVSN | 150 | LQSSHFP | 151 |
| | TTYFN | | RFS | | WT | |
| CD3_SP11a_bkm2 | RSSQSLVRSDG | 149 | RVSN | 150 | LQSSHFP | 151 |
| | TTYFN | | RFS | | WT | |
| CD3_sp11a_hz0 | RSSQSLVRSDG | 149 | RVSN | 150 | LQSSHFP | 151 |
| | TTYFN | | RFS | | WT | |
| CD3_SP11A_HZ1 | RSSQSLVRSDG | 149 | RVSN | 150 | LQSSH | 484 |
| | TTYFN | | RFS | | | |
| CD3_sp11a_sansPTM_hz1 | RSSQSLVRSEG | 487 | RVSN | 150 | LQSSHFP | 151 |
| | TTYFN | | RFS | | WT | |
| CD3_sp11a_sansPTM_rat | RSSQSLVRSEG | 487 | RVSN | 150 | LQSSHFP | 151 |
| | TTYFN | | RFS | | WT | |
| CD3_sp11a_VHVL_YY | RSSQSLVRSDG | 149 | RVSN | 150 | LQSSHFP | 151 |
| | TTYFN | | RFS | | WT | |
| CD3_SP11A_VHVL_SS | RSSQSLVRSDG | 149 | RVSN | 150 | LQSSHFP | 151 |
| | TTYFN | | RFS | | WT | |
| CD3_SP11A_VHVL_WS | RSSQSLVRSDG | 149 | RVSN | 150 | LQSSHFP | 151 |
| | TTYFN | | RFS | | WT | |
| CD3_sp11a_VHVL_SW | RSSQSLVRSDG | 149 | RVSN | 150 | LQSSHFP | 151 |
| | TTYFN | | RFS | | WT | |
| CD3_SP11A_VHVL_TT | RSSQSLVRSDG | 149 | RVSN | 150 | LQSSHFP | 151 |
| | TTYFN | | RFS | | WT | |
| CD3_SP11A_VHVL_TW | RSSQSLVRSDG | 149 | RVSN | 150 | LQSSHFP | 151 |
| | TTYFN | | RFS | | WT | |
| CD3_SP11A_VHVL_VVT | RSSQSLVRSDG | 149 | RVSN | 150 | LQSSHFP | 151 |
| | TTYFN | | RFS | | WT | |
| CD3_SP11A VH3_VLK_3 | RSSQSLVRSEG | 487 | RVSN | 150 | LQSSHFP | 151 |
| | TTYFN | | RFS | | WT | |
| CD3_sp11a_VH1_VK2 | RSSQSLVRSDG | 149 | RVSN | 150 | LQSSHFP | 151 |
| | TTYFN | | RFS | | WT | |
| CD3_SP11A_VH3_VLK1 | RSSQSLVRSEG | 487 | RVSN | 150 | LQSSHFP | 151 |
| | TTYFN | | RFS | | WT | |
| CD3_SP11A_VH5_VK2 | RSSQSLVRSDG | 149 | RVSN | 150 | LQSSHFP | 151 |
| | TTYFN | | RFS | | WT | |
| CD3_sp9aFW1_VL_VH_S5 | KASQNINNYLN | 213 | NTDHL | 214 | LQHRSRY | 215 |
| 6G | | | QA | | T | |
| CD3_SP9AFW4_VL_VH_S | KASQNINNYLN | 213 | NTDHL | 214 | LQHRSRY | 215 |
| 56G | | | QA | | T | |
| CD3_sp9aFW1_VLVH | KASQNINNYLN | 213 | NTDHL | 214 | LQHRSRY | 215 |
| | | | QA | | T | |
| CD3_sp9aFW4_VLVH | KASQNINNYLN | 213 | NTDHL | 214 | LQHRSRY | 215 |
| | | | QA | | T | |
| CD3_sp9arabtor_VHVL | KASQNINNYLN | 213 | NTDHL | 214 | LQHRSRY | 215 |
| | | | QA | | T | |
| CD3_sp9arabtor_VLVH | KASQNINNYLN | 213 | NTDHL | 214 | LQHRSRY | 215 |
| | | | QA | | T | |
| CD3_sp11a_VHVL_YY_SA | RSSQSLVRSEG | 487 | RVSN | 150 | LQSSHFP | 151 |
| NSPTM | TTYFN | | RFS | | WT | |
| CD3_sp11a_VHVL_YY_SA | RSSQSLVRSEG | 487 | RVSN | 150 | LQSSHFP | 151 |
| NSPTM_Y | TTYFN | | RFS | | WT | |
| CD3_sp11a_VHVL_YY_SA | RSSQSLVRSEG | 487 | RVSN | 150 | LQSSHFP | 151 |
| NSPTM_S | TTYFN | | RFS | | WT | |
| CD3_sp11a_VHVL_YY_Y | RSSQSLVRSDG | 149 | RVSN | 150 | LQSSHFP | 151 |
| | TTYFN | | RFS | | WT | |
| CD3_sp11a_VHVL_YY_s | RSSQSLVRSDG | 149 | RVSN | 150 | LQSSHFP | 151 |
| | TTYFN | | RFS | | WT | |
| CD3_sp11a_VHVL_SS_SA | RSSQSLVRSEG | 487 | RVSN | 150 | LQSSHFP | 151 |
| NSPTM | TTYFN | | RFS | | WT | |
| CD3_sp11a_VHVL_SS_SA | RSSQSLVRSEG | 487 | RVSN | 150 | LQSSHFP | 151 |
| NSPTM_Y | TTYFN | | RFS | | WT | |
| CD3_sp11a_VHVL_SS_SA | RSSQSLVRSEG | 487 | RVSN | 150 | LQSSHFP | 151 |
| NSPTM_S | TTYFN | | RFS | | WT | |
| CD3_sp11a_VHVL_SS_Y | RSSQSLVRSDG | 149 | RVSN | 150 | LQSSHFP | 151 |
| | TTYFN | | RFS | | WT | |
| CD3_sp11a_VHVL_SS_S | RSSQSLVRSDG | 149 | RVSN | 150 | LQSSHFP | 151 |
| | TTYFN | | RFS | | WT | |
| CD3_sp11a_VHVL_ SS_ | RSSQSLVRSEG | 487 | RVSN | 150 | LQSSHFP | 151 |
| SANSPTM | TTYFN | | RFS | | WT | |
| CD3_sp11a_VHVL_WS_ | RSSQSLVRSEG | 487 | RVSN | 150 | LQSSHFP | 151 |
| SANSPTM_Y | TTYFN | | RFS | | WT | |
| CD3_sp11a_VHVL_WS_ | RSSQSLVRSEG | 487 | RVSN | 150 | LQSSHFP | 151 |
| SANSPTM _S | TTYFN | | RFS | | WT | |
| CD3_sp11a_VHVL_WS_Y | RSSQSLVRSDG | 149 | RVSN | 150 | LQSSHFP | 151 |
| | TTYFN | | RFS | | WT | |
| CD3_sp11a_VHVL_WS_S | RSSQSLVRSDG | 149 | RVSN | 150 | LQSSHFP | 151 |
| | TTYFN | | RFS | | WT | |
| CD3_sp11a_VHVL_WS_ | RSSQSLVRSEG | 487 | RVSN | 150 | LQSSHFP | 151 |
| SANSPTM | TTYFN | | RFS | | WT | |
| CD3_sp11a_VHVL_SW_ | RSSQSLVRSEG | 487 | RVSN | 150 | LQSSHFP | 151 |
| SANSPTM _Y | TTYFN | | RFS | | WT | |
| CD3_sp11a_VHVL_SW_ | RSSQSLVRSEG | 487 | RVSN | 150 | LQSSHFP | 151 |
| SANSPTM_S | TTYFN | | RFS | | WT | |
| CD3_sp11a_VHVL_SW_Y | RSSQSLVRSDG | 149 | RVSN | 150 | LQSSHFP | 151 |
| | TTYFN | | RFS | | WT | |
| CD3_sp11a_VHVL_SW_S | RSSQSLVRSDG | 149 | RVSN | 150 | LQSSHFP | 151 |
| | TTYFN | | RFS | | WT | |
| CD3_sp11a_VHVL_SW_ | RSSQSLVRSEG | 487 | RVSN | 150 | LQSSHFP | 151 |
| SANSPTM | TTYFN | | RFS | | WT | |
| CD3_sp11a_VHVL_TW_ | RSSQSLVRSEG | 487 | RVSN | 150 | LQSSHFP | 151 |
| SANSPTM_Y | TTYFN | | RFS | | WT | |
| CD3_sp11a_VHVL_TW | RSSQSLVRSEG | 487 | RVSN | 150 | LQSSHFP | 151 |
| SANSPTM_S | TTYFN | | RFS | | WT | |
| CD3_sp11a_VHVL_TW_Y | RSSQSLVRSDG | 149 | RVSN | 150 | LQSSHFP | 151 |
| | TTYFN | | RFS | | WT | |
| CD3_sp11a_VHVL_TW_S | RSSQSLVRSDG | 149 | RVSN | 150 | LQSSHFP | 151 |
| | TTYFN | | RFS | | WT | |
| CD3_sp11a_VHVL_TW_ | RSSQSLVRSEG | 487 | RVSN | 150 | LQSSHFP | 151 |
| SANSPTM | TTYFN | | RFS | | WT | |
| CD3_sp11a_VHVL_TT_ | RSSQSLVRSEG | 487 | RVSN | 150 | LQSSHFP | 151 |
| SANSPTM_Y | TTYFN | | RFS | | WT | |
| CD3_sp11a_VHVL_TT_SA | RSSQSLVRSEG | 487 | RVSN | 150 | LQSSHFP | 151 |
| NSPTM_S | TTYFN | | RFS | | WT | |
| CD3_sp11a_VHVL_TT_Y | RSSQSLVRSDG | 149 | RVSN | 150 | LQSSHFP | 151 |
| | TTYFN | | RFS | | WT | |
| CD3_sp11a_VHVL_TT_S | RSSQSLVRSDG | 149 | RVSN | 150 | LQSSHFP | 151 |
| | TTYFN | | RFS | | WT | |
| CD3_sp11a_VHVL_TT_SA | RSSQSLVRSEG | 487 | RVSN | 150 | LQSSHFP | 151 |
| NSPTM | TTYFN | | RFS | | WT | |
| CD3_SP11AVH3_VLK_3_Y | RSSQSLVRSEG | 487 | RVSN | 150 | LQSSHFP | 151 |
| | TTYFN | | RFS | | WT | |
| CD3_SP11AVH3_VLK_3_S | RSSQSLVRSEG | 487 | RVSN | 150 | LQSSHFP | 151 |
| | TTYFN | | RFS | | WT | |
| CD3_SP11AVH3_VLK_3_Y_ | RSSQSLVRSDG | 149 | RVSN | 150 | LQSSHFP | 151 |
| PTM | TTYFN | | RFS | | WT | |
| CD3_SP11AVH3_VLK_3_S_ | RSSQSLVRSDG | 149 | RVSN | 150 | LQSSHFP | 151 |
| PTM | TTYFN | | RFS | | WT | |
| CD3_SP11AVH3_VLK_3_Y_ | RSSQSLVRSEG | 487 | RVSN | 150 | LQSSHFP | 151 |
| SW | TTYFN | | RFS | | WT | |
| CD3_SP11AVH3_VLK_3_S_ | RSSQSLVRSEG | 487 | RVSN | 150 | LQSSHFP | 151 |
| SW | TTYFN | | RFS | | WT | |
| CD3_SP11AVH3_VLK_3_Y_ | RSSQSLVRSDG | 149 | RVSN | 150 | LQSSHFP | 151 |
| PTM_SW | TTYFN | | RFS | | WT | |
| CD3_SP11AVH3_VLK_3_S_ | RSSQSLVRSDG | 149 | RVSN | 150 | LQSSHFP | 151 |
| SVVPTM | TTYFN | | RFS | | WT | |
| CD3_SP11AVH3_VLK_SW | RSSQSLVRSDG | 149 | RVSN | 150 | LQSSHFP | 151 |
| PTM | TTYFN | | RFS | | WT | |
| CD3_SP11AVH3_VLK_3_S | RSSQSLVRSEG | 487 | RVSN | 150 | LQSSHFP | 151 |
| W | TTYFN | | RFS | | WT | |
| CD3_sp11a_VH1_VK2_Y | RSSQSLVRSDG | 149 | RVSN | 150 | LQSSHFP | 151 |
| | TTYFN | | RFS | | WT | |
| CD3_sp11a_VH1_VK2_S | RSSQSLVRSDG | 149 | RVSN | 150 | LQSSHFP | 151 |
| | TTYFN | | RFS | | WT | |
| CD3_sp11a_VH1_VK2_Y_P | RSSQSLVRSEG | 487 | RVSN | 150 | LQSSHFP | 151 |
| TM | TTYFN | | RFS | | WT | |
| CD3_sp11a_VH1_VK2_S_P | RSSQSLVRSEG | 487 | RVSN | 150 | LQSSHFP | 151 |
| TM | TTYFN | | RFS | | WT | |
| CD3_sp11a_VH1_VK2_Y_SW | RSSQSLVRSDG | 149 | RVSN | 150 | LQSSHFP | 151 |
| | TTYFN | | RFS | | WT | |
| CD3_sp11a_VH1_VK2_S_SW | RSSQSLVRSDG | 149 | RVSN | 150 | LQSSHFP | 151 |
| | TTYFN | | RFS | | WT | |
| CD3_sp11a_VH1_VK2_Y_P | RSSQSLVRSEG | 487 | RVSN | 150 | LQSSHFP | 151 |
| TM | TTYFN | | RFS | | WT | |
| CD3_sp11a_VH1_VK2_S_P | RSSQSLVRSEG | 487 | RVSN | 150 | LQSSHFP | 151 |
| TM_SW | TTYFN | | RFS | | WT | |
| CD3_sp11a_VH1_VK2_SW | RSSQSLVRSDG | 149 | RVSN | 150 | LQSSHFP | 151 |
| | TTYFN | | RFS | | WT | |
| CD3_sp11a_VH1_VK2_SW_ | RSSQSLVRSEG | 487 | RVSN | 150 | LQSSHFP | 151 |
| PTM | TTYFN | | RFS | | WT | |
| CD3_SP11A_VH3_VLK1_Y | RSSQSLVRSEG | 487 | RVSN | 150 | LQSSHFP | 151 |
| | TTYFN | | RFS | | WT | |
| CD3_SP11A_VH3_VLK1_S | RSSQSLVRSEG | 487 | RVSN | 150 | LQSSHFP | 151 |
| | TTYFN | | RFS | | WT | |
| CD3_SP11A_VH3_VLK1_Y_ | RSSQSLVRSEG | 487 | RVSN | 150 | LQSSHFP | 151 |
| PTM | TTYFN | | RFS | | WT | |
| CD3_SP11A_VH3_VLK1_S_ | RSSQSLVRSDG | 149 | RVSN | 150 | LQSSHFP | 151 |
| PTM | TTYFN | | RFS | | WT | |
| CD3_SP11A_VH3_VLK1_Y_ | RSSQSLVRSEG | 487 | RVSN | 150 | LQSSHFP | 151 |
| SW | TTYFN | | RFS | | WT | |
| CD3_SP11A_VH3_VLK1_S_ | RSSQSLVRSEG | 487 | RVSN | 150 | LQSSHFP | 151 |
| SW | TTYFN | | RFS | | WT | |
| CD3_SP11A_VH3_VLK1_Y_ | RSSQSLVRSEG | 487 | RVSN | 150 | LQSSHFP | 151 |
| PTM | TTYFN | | RFS | | WT | |
| CD3_SP11A_VH3_VLK1_S_ | RSSQSLVRSDG | 149 | RVSN | 150 | LQSSHFP | 151 |
| PTM_SW | TTYFN | | RFS | | WT | |
| CD3_SP11A_VH3_VLK1PT | RSSQSLVRSDG | 149 | RVSN | 150 | LQSSHFP | 151 |
| M_SW | TTYFN | | RFS | | WT | |
| CD3_SP11A_VH3_VLK1_S | RSSQSLVRSEG | 487 | RVSN | 150 | LQSSHFP | 151 |
| W | TTYFN | | RFS | | WT | |
| CD3_SP11A_VH5_VK2_Y | RSSQSLVRSDG | 149 | RVSN | 150 | LQSSHFP | 151 |
| | TTYFN | | RFS | | WT | |
| CD3_SP11A_VH5_VK2_S | RSSQSLVRSDG | 149 | RVSN | 150 | LQSSHFP | 151 |
| | TTYFN | | RFS | | WT | |
| CD3_SP11A_VH5_VK2_Y_ | RSSQSLVRSDG | 149 | RVSN | 150 | LQSSHFP | 151 |
| PTM | TTYFN | | RFS | | WT | |
| CD3_SP11A_VH5_VK2_S_ | RSSQSLVRSDG | 149 | RVSN | 150 | LQSSHFP | 151 |
| PTM | TTYFN | | RFS | | WT | |
| CD3_SP11A_VH5_VK2_Y_ | RSSQSLVRSDG | 149 | RVSN | 150 | LQSSHFP | 151 |
| SW | TTYFN | | RFS | | WT | |
| CD3_SP11A_VH5_VK2_S_ | RSSQSLVRSDG | 149 | RVSN | 150 | LQSSHFP | 151 |
| SW | TTYFN | | RFS | | WT | |
| CD3_SP11A_VH5_VK2_Y_ | RSSQSLVRSDG | 149 | RVSN | 150 | LQSSHFP | 151 |
| PTM_SW | TTYFN | | RFS | | WT | |
| CD3_SP11A_VH5_VK2_S_ | RSSQSLVRSDG | 149 | RVSN | 150 | LQSSHFP | 151 |
| PTM_SW | TTYFN | | RFS | | WT | |
| CD3_SP11A_VH5_VK2_PT | RSSQSLVRSDG | 149 | RVSN | 150 | LQSSHFP | 151 |
| M_SW | TTYFN | | RFS | | WT | |
| CD3_SP11A_VH5_VK2_SW | RSSQSLVRSDG | 149 | RVSN | 150 | LQSSHFP | 151 |
| | TTYFN | | RFS | | WT | |

TABLE 1H-1
CD3 Binders - Heavy Chain CDR sequences according to combination of Kabat and
IMGT numbering schemes

| | | SEQ ID | | SEQ ID | | SEQ ID |
|---|---|---|---|---|---|---|
| Binder | CDR-H1 | NO: | CDR-H2 | NO: | CDR-H3 | NO: |
| NOV292 | GFTFSK | 133 | MIYYDSSKMY | 134 | ASFVWVDLDFD | 144 |
| | NGMH | | YADTVKG | | H | |
| NOV123 | GYTFTS | 165 | YIYPGHDAIYY | 166 | VRPNTMMAPL | 176 |
| | YYIY | | SENFKG | | AY | |
| Sp10b | GYTFTS | 165 | YIYPGHDAIYY | 166 | VRPNTMMAPL | 176 |
| | YYIY | | SENFKG | | AY | |
| NOV453 | GFSLTT | 197 | RMRYSGDTSF | 198 | TSDPMYIPNYS | 208 |
| | YNVH | | NAALTS | | YGVMNA | |
| NOV229 | GFSLTT | 197 | RMRYSGDTSF | 198 | ARDPMYIPNYS | 240 |
| | YNVH | | NAALTS | | YGVMNA | |
| NOV110 | GYTFTS | 165 | YIYPANGGIYY | 262 | ARPVTMMAPL | 272 |
| | YYIY | | SEKFKG | | VF | |
| NOV832 | GYTFTS | 165 | YIYPANGGIYY | 262 | ARPVTMMAPL | 272 |
| | YYIY | | SEKFKG | | VF | |
| NOV589 | GFTFSK | 133 | MIYYDSSRMY | 326 | ASFVWVDLDFD | 336 |
| | NGMH | | YADTVKG | | Y | |
| NOV580 | GFSLTT | 357 | RMRYSGDTSY | 358 | TRDPMYIPGYS | 368 |
| | YNIH | | SSALKS | | YGVMNA | |
| NOV567 | GFAFRK | 389 | LIYYDSSKMNY | 390 | AALNSEYD | 400 |
| | YGMS | | ADTVKG | | | |
| NOV221 | GFSLTT | 357 | RMRYSGDTSY | 358 | TRDPMYIPGYS | 368 |
| | YNIH | | SSALKS | | YGVMNA | |
| CD3_sp11a_bkm1 | GFTFSK | 133 | MIYYDSSKMY | 134 | ASFVWVDLDFD | 144 |
| | NGMH | | YADTVKG | | H | |
| CD3_SP11a_bkm2 | GFTFSK | 133 | MIYYDSSKMY | 134 | AKFVWVDLDFD | 462 |
| | NGMH | | YADTVKG | | H | |
| CD3_sp11a_hz0 | GFTFSK | 133 | MIYYDSSKMY | 134 | AKFVWVDLDFD | 462 |
| | NGMH | | YADTVKG | | H | |
| CD3_SP11A_HZ1 | GFTFSK | 133 | MIYYDSSKMY | 134 | ASFVWVDLDFD | 144 |
| | NGMH | | YADTVKG | | H | |
| CD3_sp11a_sansPTM_ | GFTFSK | 481 | MIYYDSSKMY | 134 | ASFVWVDLDFD | 144 |
| hz1 | QGMH | | YADTVKG | | H | |
| CD3_sp11a_sansPTM_ | GFTFSK | 481 | MIYYDSSKMY | 134 | ASFVWVDLDFD | 144 |
| rat | QGMH | | YADTVKG | | H | |
| CD3_sp11a_VHVL_YY | GFTFSK | 133 | MIYYDSSKMY | 134 | ASFYYDLDFD | 470 |
| | NGMH | | YADTVKG | | H | |
| CD3_SP11A_VHVL_SS | GFTFSK | 133 | MIYYDSSKMY | 134 | ASFSSDLDFD | 464 |
| | NGMH | | YADTVKG | | H | |
| CD3_SP11A_VHVL_W | GFTFSK | 133 | MIYYDSSKMY | 134 | ASFWSDLDFD | 468 |
| S | NGMH | | YADTVKG | | H | |
| CD3_sp11a_VHVL_SW | GFTFSK | 133 | MIYYDSSKMY | 134 | ASFSVVDLDFD | 465 |
| NGMH | YADTVKG | H | | | | |
| CD3_SP11A_VHVL_TT | GFTFSK | 133 | MIYYDSSKMY | 134 | ASFTTDLDFDH | 466 |
| | NGMH | | YADTVKG | | | |
| CD3_SP11A_VHVL_T | GFTFSK | 133 | MIYYDSSKMY | 134 | ASFTWDLDFD | 467 |
| W | NGMH | | YADTVKG | | H | |
| CD3_SP11A_VHVL_W | GFTFSK | 133 | MIYYDSSKMY | 134 | ASFVVTDLDFD | 469 |
| T | NGMH | | YADTVKG | | H | |
| CD3_SP11A | GFTFSK | 133 | MIYYDSSKMY | 134 | ASFVWVDLDFD | 144 |
| VH3_VLK_3 | NGMH | | YADTVKG | | H | |
| CD3_sp11a_VH1_VK2 | GFTFSK | 481 | MIYYDSSKMY | 134 | ASFVWVDLDFD | 144 |
| | QGMH | | YADTVKG | | H | |
| CD3_SP11A_VH3_VLK1 | GFTFSK | 133 | MIYYDSSKMY | 134 | ASFVWVDLDFD | 144 |
| | NGMH | | YADTVKG | | H | |
| CD3_SP11A_VH5_VK2 | GFTFSK | 481 | MIYYDSSKMY | 134 | ASFVWVDLDFD | 144 |
| | QGMH | | YADTVKG | | H | |
| CD3_sp9aFW1_VL_VH_ | GFSLTT | 197 | RMRYSGDTSF | 198 | ASDPMYIPNYA | 463 |
| S56G | YNVH | | NAALTS | | YGVMNA | |
| CD3_SP9AFW4_VL_V | GFSLTT | 197 | RMRYSGDTSF | 198 | ASDPMYIPNYA | 463 |
| H_S56G | YNVH | | NAALTS | | YGVMNA | |
| CD3_sp9aFW1_VLVH | GFSLTT | 197 | RMRYSGDTSF | 198 | ASDPMYIPNYA | 463 |
| | YNVH | | NAALTS | | YGVMNA | |
| CD3_sp9aFW4_VLVH | GFSLTT | 197 | RMRYSGDTSF | 198 | ASDPMYIPNYA | 463 |
| | YNVH | | NAALTS | | YGVMNA | |
| CD3_sp9arabtor_VHVL | GFSLTT | 197 | RMRYSGDTSF | 198 | ASDPMYIPNYA | 463 |
| | YNVH | | NAALTS | | YGVMNA | |
| CD3_sp9arabtor_VLVH | GFSLTT | 197 | RMRYSGDTSF | 198 | ASDPMYIPNYA | 463 |
| | YNVH | | NAALTS | | YGVMNA | |
| CD3_SP11AVH3_VLK_ | GFTFSK | 133 | MIYYDSSKMY | 134 | ASYVWVDLDFD | 553 |
| 3_Y | NGMH | | YADTVKG | | H | |
| CD3_SP11AVH3_VLK_ | GFTFSK | 133 | MIYYDSSKMY | 134 | ASSVWVDLDFD | 546 |
| 3_S | NGMH | | YADTVKG | | H | |
| CD3_SP11AVH3_VLK_ | GFTFSK | 133 | MIYYDSSKMY | 134 | ASYVWVDLDFD | 553 |
| 3_Y_PTM | NGMH | | YADTVKG | | H | |
| CD3_SP11AVH3_VLK_ | GFTFSK | 133 | MIYYDSSKMY | 134 | ASSVWVDLDFD | 546 |
| 3_S_PTM | NGMH | | YADTVKG | | H | |
| CD3_SP11AVH3_VLK_ | GFTFSK | 133 | MIYYDSSKMY | 134 | ASYSVVDLDFD | 549 |
| 3_Y_SW | NGMH | | YADTVKG | | H | |
| CD3_SP11AVH3_VLK_ | GFTFSK | 133 | MIYYDSSKMY | 134 | ASSSVVDLDFD | 542 |
| 3_S_SW | NGMH | | YADTVKG | | H | |
| CD3_SP11AVH3_VLK_ | GFTFSK | 133 | MIYYDSSKMY | 134 | ASYSVVDLDFD | 549 |
| 3_Y_PTM_SW | NGMH | | YADTVKG | | H | |
| CD3_SP11AVH3_VLK_ | GFTFSK | 133 | MIYYDSSKMY | 134 | ASSSVVDLDFD | 542 |
| 3_S_SVVPTM | NGMH | | YADTVKG | | H | |
| CD3_SP11AVH3_VLK_ | GFTFSK | 133 | MIYYDSSKMY | 134 | ASFSVVDLDFD | 465 |
| SVVPTM | NGMH | | YADTVKG | | H | |
| CD3_SP11AVH3_VLK_ | GFTFSK | 133 | MIYYDSSKMY | 134 | ASFSVVDLDFD | 465 |
| 3_SW | NGMH | | YADTVKG | | H | |
| CD3_sp11a_VH1_VK2_ | GFTFSK | 481 | MIYYDSSKMY | 134 | ASYVWVDLDFD | 553 |
| Y | QGMH | | YADTVKG | | H | |
| CD3_sp11a_VH1_VK2_ | GFTFSK | 481 | MIYYDSSKMY | 134 | ASSVWVDLDFD | 546 |
| S | QGMH | | YADTVKG | | H | |
| CD3_sp11a_VH1_VK2_ | GFTFSK | 133 | MIYYDSSKMY | 134 | ASYVWVDLDFD | 553 |
| Y_PTM | NGMH | | YADTVKG | | H | |
| CD3_sp11a_VH1_VK2_ | GFTFSK | 133 | MIYYDSSKMY | 134 | ASSVWVDLDFD | 546 |
| S_PTM | NGMH | | YADTVKG | | H | |
| CD3_sp11a_VH1_VK2_ | GFTFSK | 481 | MIYYDSSKMY | 134 | ASYSVVDLDFD | 549 |
| Y_SW | QGMH | | YADTVKG | | H | |
| CD3_sp11a_VH1_VK2_ | GFTFSK | 481 | MIYYDSSKMY | 134 | ASSSVVDLDFD | 542 |
| S_SW | QGMH | | YADTVKG | | H | |
| CD3_sp11a_VH1_VK2_ | GFTFSK | 133 | MIYYDSSKMY | 134 | ASYSVVDLDFD | 549 |
| Y_PTM | NGMH | | YADTVKG | | H | |
| CD3_sp11a_VH1_VK2_ | GFTFSK | 133 | MIYYDSSKMY | 134 | ASSSVVDLDFD | 542 |
| S_PTM_SW | NGMH | | YADTVKG | | H | |
| CD3 sp11a_VH1_VK2_ | GFTFSK | 481 | MIYYDSSKMY | 134 | ASFSVVDLDFD | 465 |
| SW | QGMH | | YADTVKG | | H | |
| CD3 sp11a_VH1_VK2_ | GFTFSK | 133 | MIYYDSSKMY | 134 | ASFSVVDLDFD | 465 |
| SW_PTM | NGMH | | YADTVKG | | H | |
| CD3_SP11A_VH3_VLK | GFTFSK | 133 | MIYYDSSKMY | 134 | ASYVWVDLDFD | 553 |
| 1_Y | NGMH | | YADTVKG | | H | |
| CD3_SP11A_VH3_VLK | GFTFSK | 133 | MIYYDSSKMY | 134 | ASSVWVDLDFD | 546 |
| 1_S | NGMH | | YADTVKG | | H | |
| CD3_SP11A_VH3_VLK | GFTFSK | 481 | MIYYDSSKMY | 134 | ASYVWVDLDFD | 553 |
| 1_Y_PTM | QGMH | | YADTVKG | | H | |
| CD3_SP11A_VH3_VLK | GFTFSK | 481 | MIYYDSSKMY | 134 | ASSVWVDLDFD | 546 |
| 1_S_PTM | QGMH | | YADTVKG | | H | |
| CD3_SP11A_VH3_VLK | GFTFSK | 133 | MIYYDSSKMY | 134 | ASYSVVDLDFD | 549 |
| 1_Y_SW | NGMH | | YADTVKG | | H | |
| CD3_SP11A_VH3_VLK | GFTFSK | 133 | MIYYDSSKMY | 134 | ASSSVVDLDFD | 542 |
| 1_S_SW | NGMH | | YADTVKG | | H | |
| CD3_SP11A_VH3_VLK | GFTFSK | 481 | MIYYDSSKMY | 134 | ASYVWVDLDFD | 553 |
| 1_Y_PTM | QGMH | | YADTVKG | | H | |
| CD3_SP11A_VH3_VLK | GFTFSK | 481 | MIYYDSSKMY | 134 | ASSSVVDLDFD | 542 |
| 1_S_PTM_SW | QGMH | | YADTVKG | | H | |
| CD3_SP11A_VH3_VLK | GFTFSK | 481 | MIYYDSSKMY | 134 | ASFSVVDLDFD | 465 |
| 1PTM_SW | QGMH | | YADTVKG | | H | |
| CD3_SP11A_VH3_VLK | GFTFSK | 133 | MIYYDSSKMY | 134 | ASFSVVDLDFD | 465 |
| 1_SW | NGMH | | YADTVKG | | H | |
| CD3_SP11A_VH5_VK2_ | GFTFSK | 481 | MIYYDSSKMY | 134 | ASYVWVDLDFD | 553 |
| Y | QGMH | | YADTVKG | | H | |
| CD3_SP11A_VH5_VK2_ | GFTFSK | 481 | MIYYDSSKMY | 134 | ASSVWVDLDFD | 546 |
| S | QGMH | | YADTVKG | | H | |
| CD3_SP11A_VH5_VK2_ | GFTFSK | 133 | MIYYDSSKMY | 134 | ASYVWVDLDFD | 553 |
| Y_PTM | NGMH | | YADTVKG | | H | |
| CD3_SP11A_VH5_VK2_ | GFTFSK | 133 | MIYYDSSKMY | 134 | ASSVWVDLDFD | 546 |
| S_PTM | NGMH | | YADTVKG | | H | |
| CD3_SP11A_VH5_VK2_ | GFTFSK | 481 | MIYYDSSKMY | 134 | ASYSVVDLDFD | 549 |
| Y_SW | QGMH | | YADTVKG | | H | |
| CD3_SP11A_VH5_VK2_ | GFTFSK | 481 | MIYYDSSKMY | 134 | ASSSVVDLDFD | 542 |
| S_SW | QGMH | | YADTVKG | | H | |
| CD3_SP11A_VH5_VK2_ | GFTFSK | 133 | MIYYDSSKMY | 134 | ASYSVVDLDFD | 549 |
| Y_PTM_SW | NGMH | | YADTVKG | | H | |
| CD3_SP11A_VH5_VK2_ | GFTFSK | 133 | MIYYDSSKMY | 134 | ASSSVVDLDFD | 542 |
| S_PTM_SW | NGMH | | YADTVKG | | H | |
| CD3_SP11A_VH5_VK2_ | GFTFSK | 133 | MIYYDSSKMY | 134 | ASFSVVDLDFD | 465 |
| PTM_SW | NGMH | | YADTVKG | | H | |
| CD3_SP11A_VH5_VK2_ | GFTFSK | 481 | MIYYDSSKMY | 134 | ASFSVVDLDFD | 465 |
| SW | QGMH | | YADTVKG | | H | |

TABLE 1H-2
CD3 Binders-Light Chain CDR sequences according to combination of Kabat and
MGT numbering schemes

| | | SEQ ID | | SEQ ID | | SEQ ID |
|---|---|---|---|---|---|---|
| Binder | CDR-L1 | NO: | CDR-L2 | NO: | CDR-L3 | NO: |
| NOV292 | RSSQSLVRSD | 149 | RVSNRFS | 150 | LQSSHF | 151 |
| | GTTYFN | | | | PWT | |
| NOV123 | RSSQSLIYSIGN | 181 | RVSNRFS | 150 | FQSTHL | 183 |
| | TYLH | | | | PYT | |
| Sp10b | RSSQSLIYSIGN | 181 | RVSNRFS | 150 | FQSTHL | 183 |
| | TYLH | | | | PYT | |
| NOV453 | KASQNINNYLN | 213 | NTDHLQA | 223 | LQHRSR | 215 |
| | | | GVP | | YT | |
| NOV229 | KASQNINNYLN | 213 | NTDHLQA | 223 | LQHRSR | 215 |
| | | | GVP | | YT | |
| NOV110 | RSSQSLVYSH | 277 | RVSNRFS | 150 | FQSTHL | 183 |
| | GNTYLH | | | | PYT | |
| NOV832 | RSSQSLVYSH | 277 | RVSNRFS | 150 | FQSTHL | 183 |
| | GNTYLH | | | | PYT | |
| NOV589 | RSSQSLVRSD | 149 | RVSNRFS | 150 | LQSSHF | 151 |
| | GTTYFN | | | | PWT | |
| NOV580 | KTSQNIDKYLN | 373 | NTNNLEA | 383 | LQHRSS | 375 |
| | | | GVP | | YT | |
| NOV567 | RGSQSIGNSLN | 405 | STSTLEY | 415 | LQYATY | 407 |
| | | | GVP | | PYT | |
| NOV221 | KSSQNIDKYLN | 437 | NTNNLEA | 383 | LQHRSG | 439 |
| | | | GVP | | YT | |
| CD3_sp11a_bkm1 | RSSQSLVRSD | 149 | RVSNRFS | 150 | LQSSHF | 151 |
| | GTTYFN | | | | PWT | |
| CD3_SP11a_bkm2 | RSSQSLVRSD | 149 | RVSNRFS | 150 | LQSSHF | 151 |
| | GTTYFN | | | | PWT | |
| CD3_sp11a_hz0 | RSSQSLVRSD | 149 | RVSNRFS | 150 | LQSSHF | 151 |
| | GTTYFN | | | | PWT | |
| CD3_SP11A_HZ1 | RSSQSLVRSD | 149 | RVSNRFS | 150 | LQSSH | 484 |
| | GTTYFN | | | | | |
| CD3_sp11a_sansPTM_hz1 | RSSQSLVRSE | 487 | RVSNRFS | 150 | LQSSHF | 151 |
| | GTTYFN | | | | PWT | |
| CD3_sp11a_sansPTM_rat | RSSQSLVRSE | 487 | RVSNRFS | 150 | LQSSHF | 151 |
| | GTTYFN | | | | PWT | |
| CD3_sp11a_VHVL_YY | RSSQSLVRSD | 149 | RVSNRFS | 150 | LQSSHF | 151 |
| | GTTYFN | | | | PWT | |
| CD3_SP11A_VHVL_SS | RSSQSLVRSD | 149 | RVSNRFS | 150 | LQSSHF | 151 |
| | GTTYFN | | | | PWT | |
| CD3_SP11A_VHVL_WS | RSSQSLVRSD | 149 | RVSNRFS | 150 | LQSSHF | 151 |
| | GTTYFN | | | | PWT | |
| CD3_sp11a_VHVL_SW | RSSQSLVRSD | 149 | RVSNRFS | 150 | LQSSHF | 151 |
| | GTTYFN | | | | PWT | |
| CD3_SP11A_VHVL_TT | RSSQSLVRSD | 149 | RVSNRFS | 150 | LQSSHF | 151 |
| | GTTYFN | | | | PWT | |
| CD3_SP11A_VHVL_TW | RSSQSLVRSD | 149 | RVSNRFS | 150 | LQSSHF | 151 |
| | GTTYFN | | | | PWT | |
| CD3_SP11A_VHVL_VVT | RSSQSLVRSD | 149 | RVSNRFS | 150 | LQSSHF | 151 |
| | GTTYFN | | | | PWT | |
| CD3_SP11A VH3_VLK_3 | RSSQSLVRSE | 487 | RVSNRFS | 150 | LQSSHF | 151 |
| | GTTYFN | | | | PWT | |
| CD3_sp11a_VH1_VK2 | RSSQSLVRSD | 149 | RVSNRFS | 150 | LQSSHF | 151 |
| | GTTYFN | | | | PWT | |
| CD3_SP11A_VH3_VLK1 | RSSQSLVRSE | 487 | RVSNRFS | 150 | LQSSHF | 151 |
| | GTTYFN | | | | PWT | |
| CD3_SP11A_VH5_VK2 | RSSQSLVRSD | 149 | RVSNRFS | 150 | LQSSHF | 151 |
| | GTTYFN | | | | PWT | |
| CD3_sp9aFW1_VL_VH_S | KASQNINNYLN | 213 | NTDHLQA | 223 | LQHRSR | 215 |
| 56G | | | GVP | | YT | |
| CD3_SP9AFW4_VL_VH_ | KASQNINNYLN | 213 | NTDHLQA | 223 | LQHRSR | 215 |
| S56G | | | GVP | | YT | |
| CD3_sp9aFW1_VLVH | KASQNINNYLN | 213 | NTDHLQA | 223 | LQHRSR | 215 |
| | | | GVP | | YT | |
| CD3_sp9aFW4_VLVH | KASQNINNYLN | 213 | NTDHLQA | 223 | LQHRSR | 215 |
| | | | GVP | | YT | |
| CD3_sp9arabtor_VHVL | KASQNINNYLN | 213 | NTDHLQA | 223 | LQHRSR | 215 |
| | | | GVP | | YT | |
| CD3_sp9arabtor_VLVH | KASQNINNYLN | 213 | NTDHLQA | 223 | LQHRSR | 215 |
| | | | GVP | | YT | |
| CD3_SP11AVH3_VLK_3_Y | RSSQSLVRSE | 487 | RVSNRFS | 150 | LQSSHF | 151 |
| | GTTYFN | | | | PWT | |
| CD3_SP11AVH3_VLK_3_S | RSSQSLVRSE | 487 | RVSNRFS | 150 | LQSSHF | 151 |
| | GTTYFN | | | | PWT | |
| CD3_SP11AVH3_VLK_3_ | RSSQSLVRSD | 149 | RVSNRFS | 150 | LQSSHF | 151 |
| Y_PTM | GTTYFN | | | | PWT | |
| CD3_SP11AVH3_VLK_3_ | RSSQSLVRSD | 149 | RVSNRFS | 150 | LQSSHF | 151 |
| S_PTM | GTTYFN | | | | PWT | |
| CD3_SP11AVH3_VLK_3_ | RSSQSLVRSE | 487 | RVSNRFS | 150 | LQSSHF | 151 |
| Y_SW | GTTYFN | | | | PWT | |
| CD3_SP11AVH3_VLK_3_ | RSSQSLVRSE | 487 | RVSNRFS | 150 | LQSSHF | 151 |
| S_SW | GTTYFN | | | | PWT | |
| CD3_SP11AVH3_VLK_3_ | RSSQSLVRSD | 149 | RVSNRFS | 150 | LQSSHF | 151 |
| Y_PTM_SW | GTTYFN | | | | PWT | |
| CD3_SP11AVH3_VLK_3_ | RSSQSLVRSD | 149 | RVSNRFS | 150 | LQSSHF | 151 |
| S_SWPTM | GTTYFN | | | | PWT | |
| CD3_SP11AVH3_VLK_S | RSSQSLVRSD | 149 | RVSNRFS | 150 | LQSSHF | 151 |
| VVPTM | GTTYFN | | | | PWT | |
| CD3_SP11AVH3_VLK_3_ | RSSQSLVRSE | 487 | RVSNRFS | 150 | LQSSHF | 151 |
| SW | GTTYFN | | | | PWT | |
| CD3_sp11a_VH1_VK2_Y | RSSQSLVRSD | 149 | RVSNRFS | 150 | LQSSHF | 151 |
| | GTTYFN | | | | PWT | |
| CD3_sp11a_VH1_VK2_S | RSSQSLVRSD | 149 | RVSNRFS | 150 | LQSSHF | 151 |
| | GTTYFN | | | | PWT | |
| CD3_sp11a_VH1_VK2_Y_ | RSSQSLVRSE | 487 | RVSNRFS | 150 | LQSSHF | 151 |
| PTM | GTTYFN | | | | PWT | |
| CD3_sp11a_VH1_VK2_S_ | RSSQSLVRSE | 487 | RVSNRFS | 150 | LQSSHF | 151 |
| PTM | GTTYFN | | | | PWT | |
| CD3_sp11a_VH1_VK2_Y_ | RSSQSLVRSD | 149 | RVSNRFS | 150 | LQSSHF | 151 |
| SW | GTTYFN | | | | PWT | |
| CD3_sp11a_VH1_VK2_S_ | RSSQSLVRSD | 149 | RVSNRFS | 150 | LQSSHF | 151 |
| SW | GTTYFN | | | | PWT | |
| CD3_sp11a_VH1_VK2_Y_ | RSSQSLVRSE | 487 | RVSNRFS | 150 | LQSSHF | 151 |
| PTM | GTTYFN | | | | PWT | |
| CD3_sp11a_VH1_VK2_S_ | RSSQSLVRSE | 487 | RVSNRFS | 150 | LQSSHF | 151 |
| PTM_SW | GTTYFN | | | | PWT | |
| CD3_sp11a_VH1_VK2_S | RSSQSLVRSD | 149 | RVSNRFS | 150 | LQSSHF | 151 |
| W | GTTYFN | | | | PWT | |
| CD3_sp11a_VH1_VK2_ | RSSQSLVRSE | 487 | RVSNRFS | 150 | LQSSHF | 151 |
| SWPTM | GTTYFN | | | | PWT | |
| CD3_SP11A_VH3_VLK1_Y | RSSQSLVRSE | 487 | RVSNRFS | 150 | LQSSHF | 151 |
| | GTTYFN | | | | PWT | |
| CD3_SP11A_VH3_VLK1_S | RSSQSLVRSE | 487 | RVSNRFS | 150 | LQSSHF | 151 |
| | GTTYFN | | | | PWT | |
| CD3_SP11A_VH3_VLK1_ | RSSQSLVRSD | 149 | RVSNRFS | 150 | LQSSHF | 151 |
| Y_PTM | GTTYFN | | | | PWT | |
| CD3_SP11A_VH3_VLK1_ | RSSQSLVRSD | 149 | RVSNRFS | 150 | LQSSHF | 151 |
| S_PTM | GTTYFN | | | | PWT | |
| CD3_SP11A_VH3_VLK1_ | RSSQSLVRSE | 487 | RVSNRFS | 150 | LQSSHF | 151 |
| Y_SW | GTTYFN | | | | PWT | |
| CD3_SP11A_VH3_VLK1_ | RSSQSLVRSE | 487 | RVSNRFS | 150 | LQSSHF | 151 |
| S_SW | GTTYFN | | | | PWT | |
| CD3_SP11A_VH3_VLK1_ | RSSQSLVRSD | 149 | RVSNRFS | 150 | LQSSHF | 151 |
| Y_PTM | GTTYFN | | | | PWT | |
| CD3_SP11A_VH3_VLK1_ | RSSQSLVRSD | 149 | RVSNRFS | 150 | LQSSHF | 151 |
| S_PTM_SW | GTTYFN | | | | PWT | |
| CD3_SP11A_VH3_VLK1P | RSSQSLVRSD | 149 | RVSNRFS | 150 | LQSSHF | 151 |
| TM_SW | GTTYFN | | | | PWT | |
| CD3_SP11A_VH3_VLK1_ | RSSQSLVRSE | 487 | RVSNRFS | 150 | LQSSHF | 151 |
| SW | GTTYFN | | | | PWT | |
| CD3_SP11A_VH5_VK2_Y | RSSQSLVRSD | 149 | RVSNRFS | 150 | LQSSHF | 151 |
| | GTTYFN | | | | PWT | |
| CD3_SP11A_VH5_VK2_S | RSSQSLVRSD | 149 | RVSNRFS | 150 | LQSSHF | 151 |
| | GTTYFN | | | | PWT | |
| CD3_SP11A_VH5_VK2_Y_ | RSSQSLVRSD | 149 | RVSNRFS | 150 | LQSSHF | 151 |
| PTM | GTTYFN | | | | PWT | |
| CD3_SP11A_VH5_VK2_S_ | RSSQSLVRSD | 149 | RVSNRFS | 150 | LQSSHF | 151 |
| PTM | GTTYFN | | | | PWT | |
| CD3_SP11A_VH5_VK2_Y_ | RSSQSLVRSD | 149 | RVSNRFS | 150 | LQSSHF | 151 |
| SW | GTTYFN | | | | PWT | |
| CD3_SP11A_VH5_VK2_S_ | RSSQSLVRSD | 149 | RVSNRFS | 150 | LQSSHF | 151 |
| SW | GTTYFN | | | | PWT | |
| CD3_SP11A_VH5_VK2_Y_ | RSSQSLVRSD | 149 | RVSNRFS | 150 | LQSSHF | 151 |
| PTM_SW | GTTYFN | | | | PWT | |
| CD3_SP11A_VH5_VK2_S_ | RSSQSLVRSD | 149 | RVSNRFS | 150 | LQSSHF | 151 |
| PTM_SW | GTTYFN | | | | PWT | |
| CD3_SP11A_VH5_VK2_P | RSSQSLVRSD | 149 | RVSNRFS | 150 | LQSSHF | 151 |
| TM_SW | GTTYFN | | | | PWT | |
| CD3_SP11A_VH5_VK2_S | RSSQSLVRSD | 149 | RVSNRFS | 150 | LQSSHF | 151 |
| W | GTTYFN | | | | PWT | |

TABLE 1I-1
CD3 Binders-Heavy Chain CDR sequences according to combination of Chothia
and IMGT numbering schemes

| | | SEQ ID | CDR- | SEQ ID | | SEQ ID |
|---|---|---|---|---|---|---|
| Binder | CDR-H1 | NO: | H2 | NO: | CDR-H3 | NO: |
| NOV292 | GFTFSK | 142 | YYDS | 140 | ASFVWVDLDFDH | 144 |
| | NG | | SK | | | |
| NOV123 | GYTFTS | 174 | YPGH | 172 | VRPNTMMAPLAY | 176 |
| | YY | | DA | | | |
| Sp10b | GYTFTS | 174 | YPGH | 172 | VRPNTMMAPLAY | 176 |
| | YY | | DA | | | |
| NOV453 | GFSLTT | 206 | RYSG | 204 | TSDPMYIPNYSY | 208 |
| | YN | | D | | GVMNA | |
| NOV229 | GFSLTT | 206 | RYSG | 204 | ARDPMYIPNYSY | 240 |
| | YN | | D | | GVMNA | |
| NOV110 | GYTFTS | 174 | YPAN | 268 | ARPVTMMAPLVF | 272 |
| | YY | | GG | | | |
| NOV832 | GYTFTS | 174 | YPAN | 268 | ARPVTMMAPLVF | 272 |
| | YY | | GG | | | |
| NOV589 | GFTFSK | 142 | YYDS | 332 | ASFVWVDLDFDY | 336 |
| | NG | | SR | | | |
| NOV580 | GFSLTT | 206 | RYSG | 204 | TRDPMYIPGYSY | 368 |
| | YN | | D | | GVMNA | |
| NOV567 | GFAFR | 398 | YYDS | 140 | AALNSEYD | 400 |
| | KYG | | SK | | | |
| NOV221 | GFSLTT | 206 | RYSG | 204 | TRDPMYIPGYSY | 368 |
| | YN | | D | | GVMNA | |
| CD3_sp11a_bkm1 | GFTFSK | 142 | YYDS | 140 | ASFVWVDLDFDH | 144 |
| | NG | | SK | | | |
| CD3_SP11a_bkm2 | GFTFSK | 142 | YYDS | 140 | AKFVWVDLDFDH | 462 |
| | NG | | SK | | | |
| CD3_sp11a_hz0 | GFTFSK | 142 | YYDS | 140 | AKFVWVDLDFDH | 462 |
| | NG | | SK | | | |
| CD3_SP11A_HZ1 | GFTFSK | 142 | YYDS | 140 | ASFVWVDLDFDH | 144 |
| | NG | | SK | | | |
| CD3_sp11a_sansPTM_hz1 | GFTFSK | 480 | YYDS | 140 | ASFVWVDLDFDH | 144 |
| | QG | | SK | | | |
| CD3_sp11a_sansPTM_rat | GFTFSK | 480 | YYDS | 140 | ASFVWVDLDFDH | 144 |
| | QG | | SK | | | |
| CD3_sp11a_VHVL_YY | GFTFSK | 142 | YYDS | 140 | ASFYYDLDFDH | 470 |
| | NG | | SK | | | |
| CD3_SP11A_VHVL_SS | GFTFSK | 142 | YYDS | 140 | ASFSSDLDFDH | 464 |
| | NG | | SK | | | |
| CD3_SP11A_VHVL_WS | GFTFSK | 142 | YYDS | 140 | ASFWSDLDFDH | 468 |
| | NG | | SK | | | |
| CD3_sp11a_VHVL_SW | GFTFSK | 142 | YYDS | 140 | ASFSVVDLDFDH | 465 |
| | NG | | SK | | | |
| CD3_SP11A_VHVL_TT | GFTFSK | 142 | YYDS | 140 | ASFTTDLDFDH | 466 |
| | NG | | SK | | | |
| CD3_SP11A_VHVL_TW | GFTFSK | 142 | YYDS | 140 | ASFTVVDLDFDH | 467 |
| | NG | | SK | | | |
| CD3_SP11A_VHVL_VVT | GFTFSK | 142 | YYDS | 140 | ASFVVTDLDFDH | 469 |
| | NG | | SK | | | |
| CD3_SP11A VH3_VLK_3 | GFTFSK | 142 | YYDS | 140 | ASFVWVDLDFDH | 144 |
| | NG | | SK | | | |
| CD3_sp11a_VH1_VK2 | GFTFSK | 480 | YYDS | 140 | ASFVWVDLDFDH | 144 |
| | QG | | SK | | | |
| CD3_SP11A_VH3_VLK1 | GFTFSK | 142 | YYDS | 140 | ASFVWVDLDFDH | 144 |
| | NG | | SK | | | |
| CD3_SP11A_VH5_VK2 | GFTFSK | 480 | YYDS | 140 | ASFVWVDLDFDH | 144 |
| | QG | | SK | | | |
| CD3 sp9aFW1_VL_VH_S5 | GFSLTT | 206 | RYSG | 204 | ASDPMYIPNYAY | 463 |
| 6G | YN | | D | | GVMNA | |
| CD3_SP9AFW4_VL_VH_S | GFSLTT | 206 | RYSG | 204 | ASDPMYIPNYAY | 463 |
| 56G | YN | | D | | GVMNA | |
| CD3_sp9aFW1_VLVH | GFSLTT | 206 | RYSG | 204 | ASDPMYIPNYAY | 463 |
| | YN | | D | | GVMNA | |
| CD3_sp9aFW4_VLVH | GFSLTT | 206 | RYSG | 204 | ASDPMYIPNYAY | 463 |
| | YN | | D | | GVMNA | |
| CD3_sp9arabtor_VHVL | GFSLTT | 206 | RYSG | 204 | ASDPMYIPNYAY | 463 |
| | YN | | D | | GVMNA | |
| CD3_sp9arabtor_VLVH | GFSLTT | 206 | RYSG | 204 | ASDPMYIPNYAY | 463 |
| | YN | | D | | GVMNA | |
| CD3_SP11AVH3_VLK_3_Y | GFTFSK | 142 | YYDS | 140 | ASYVWVDLDFDH | 553 |
| | NG | | SK | | | |
| CD3_SP11AVH3_VLK_3_S | GFTFSK | 142 | YYDS | 140 | ASSVWVDLDFDH | 546 |
| | NG | | SK | | | |
| CD3_SP11AVH3_VLK_3_Y_ | GFTFSK | 142 | YYDS | 140 | ASYVWVDLDFDH | 553 |
| PTM | NG | | SK | | | |
| CD3_SP11AVH3_VLK_3_S_ | GFTFSK | 142 | YYDS | 140 | ASSVWVDLDFDH | 546 |
| PTM | NG | | SK | | | |
| CD3_SP11AVH3_VLK_3_Y_ | GFTFSK | 142 | YYDS | 140 | ASYSVVDLDFDH | 549 |
| SW | NG | | SK | | | |
| CD3_SP11AVH3_VLK_3_S_ | GFTFSK | 142 | YYDS | 140 | ASSSVVDLDFDH | 542 |
| SW | NG | | SK | | | |
| CD3_SP11AVH3_VLK_3_Y_ | GFTFSK | 142 | YYDS | 140 | ASYSVVDLDFDH | 549 |
| PTM_SW | NG | | SK | | | |
| CD3_SP11AVH3_VLK_3_S_ | GFTFSK | 142 | YYDS | 140 | ASSSVVDLDFDH | 542 |
| SVVPTM | NG | | SK | | | |
| CD3_SP11AVH3_VLK_SW | GFTFSK | 142 | YYDS | 140 | ASFSVVDLDFDH | 465 |
| PTM | NG | | SK | | | |
| CD3_SP11AVH3_VLK_3_SW | GFTFSK | 142 | YYDS | 140 | ASFSVVDLDFDH | 465 |
| | NG | | SK | | | |
| CD3_sp11a_VH1_VK2_Y | GFTFSK | 480 | YYDS | 140 | ASYVWVDLDFDH | 553 |
| | QG | | SK | | | |
| CD3_sp11a_VH1_VK2_S | GFTFSK | 480 | YYDS | 140 | ASSVWVDLDFDH | 546 |
| | QG | | SK | | | |
| CD3_sp11a_VH1_VK2_Y_ | GFTFSK | 142 | YYDS | 140 | ASYVWVDLDFDH | 553 |
| PTM | NG | | SK | | | |
| CD3_sp11a_VH1_VK2_S_ | GFTFSK | 142 | YYDS | 140 | ASSVWVDLDFDH | 546 |
| PTM | NG | | SK | | | |
| CD3_sp11a_VH1_VK2_Y_ | GFTFSK | 480 | YYDS | 140 | ASYSVVDLDFDH | 549 |
| SW | QG | | SK | | | |
| CD3_sp11a_VH1_VK2_S_ | GFTFSK | 480 | YYDS | 140 | ASSSVVDLDFDH | 542 |
| SW | QG | | SK | | | |
| CD3_sp11a_VH1_VK2_Y_ | GFTFSK | 142 | YYDS | 140 | ASYSVVDLDFDH | 549 |
| PTM | NG | | SK | | | |
| CD3_sp11a_VH1_VK2_S_ | GFTFSK | 142 | YYDS | 140 | ASSSVVDLDFDH | 542 |
| PTM_SW | NG | | SK | | | |
| CD3_sp11a_VH1_VK2_SW | GFTFSK | 480 | YYDS | 140 | ASFSVVDLDFDH | 465 |
| | QG | | SK | | | |
| CD3_sp11a_VH1_VK2_SW_ | GFTFSK | 142 | YYDS | 140 | ASFSVVDLDFDH | 465 |
| PTM | NG | | SK | | | |
| CD3_SP11A_VH3_VLK1_Y | GFTFSK | 142 | YYDS | 140 | ASYVWVDLDFDH | 553 |
| | NG | | SK | | | |
| CD3_SP11A_VH3_VLK1_S | GFTFSK | 142 | YYDS | 140 | ASSVWVDLDFDH | 546 |
| | NG | | SK | | | |
| CD3_SP11A_VH3_VLK1_Y_ | GFTFSK | 480 | YYDS | 140 | ASYVWVDLDFDH | 553 |
| PTM | QG | | SK | | | |
| CD3_SP11A_VH3_VLK1_S_ | GFTFSK | 480 | YYDS | 140 | ASSVWVDLDFDH | 546 |
| PTM | QG | | SK | | | |
| CD3_SP11A_VH3_VLK1_Y_ | GFTFSK | 142 | YYDS | 140 | ASYSVVDLDFDH | 549 |
| SW | NG | | SK | | | |
| CD3_SP11A_VH3_VLK1_S_ | GFTFSK | 142 | YYDS | 140 | ASSSVVDLDFDH | 542 |
| SW | NG | | SK | | | |
| CD3_SP11A_VH3_VLK1_Y_ | GFTFSK | 480 | YYDS | 140 | ASYVWVDLDFDH | 553 |
| PTM | QG | | SK | | | |
| CD3_SP11A_VH3_VLK1_S_ | GFTFSK | 480 | YYDS | 140 | ASSSVVDLDFDH | 542 |
| PTM_SW | QG | | SK | | | |
| CD3_SP11A_VH3_VLK1PTM_ | GFTFSK | 480 | YYDS | 140 | ASFSVVDLDFDH | 465 |
| SW | QG | | SK | | | |
| CD3_SP11A_VH3_VLK1_S | GFTFSK | 142 | YYDS | 140 | ASFSVVDLDFDH | 465 |
| W | NG | | SK | | | |
| CD3_SP11A_VH5_VK2_Y | GFTFSK | 480 | YYDS | 140 | ASYVWVDLDFDH | 553 |
| | QG | | SK | | | |
| CD3_SP11A_VH5_VK2_S | GFTFSK | 480 | YYDS | 140 | ASSVWVDLDFDH | 546 |
| | QG | | SK | | | |
| CD3_SP11A_VH5_VK2_Y_ | GFTFSK | 142 | YYDS | 140 | ASYVWVDLDFDH | 553 |
| PTM | NG | | SK | | | |
| CD3_SP11A_VH5_VK2_S_ | GFTFSK | 142 | YYDS | 140 | ASSVWVDLDFDH | 546 |
| PTM | NG | | SK | | | |
| CD3_SP11A_VH5_VK2_Y_ | GFTFSK | 480 | YYDS | 140 | ASYSVVDLDFDH | 549 |
| SW | QG | | SK | | | |
| CD3_SP11A_VH5_VK2_S_ | GFTFSK | 480 | YYDS | 140 | ASSSVVDLDFDH | 542 |
| SW | QG | | SK | | | |
| CD3_SP11A_VH5_VK2_Y_ | GFTFSK | 142 | YYDS | 140 | ASYSVVDLDFDH | 549 |
| PTM_SW | NG | | SK | | | |
| CD3_SP11A_VH5_VK2_S_ | GFTFSK | 142 | YYDS | 140 | ASSSVVDLDFDH | 542 |
| PTM_SW | NG | | SK | | | |
| CD3_SP11A_VH5_VK2_PT | GFTFSK | 142 | YYDS | 140 | ASFSVVDLDFDH | 465 |
| M_SW | NG | | SK | | | |
| CD3_SP11A_VH5_VK2_S | GFTFSK | 480 | YYDS | 140 | ASFSVVDLDFDH | 465 |
| W | QG | | SK | | | |

TABLE 1I-2
CD3 Binders - Light Chain CDR sequences according to combination of Chothia
and IMGT numbering schemes

| | | SEQ ID | | SEQ ID | | SEQ ID |
|---|---|---|---|---|---|---|
| Binder | CDR-L1 | NO: | CDR-L2 | NO: | CDR-L3 | NO: |
| NOV292 | SQSLVRSD | 155 | RVS | 156 | LQSSHF | 151 |
| | GTTY | | | | PWT | |
| NOV123 | SQSLIYSIG | 187 | RVS | 156 | FQSTHL | 183 |
| | NTY | | | | PYT | |
| Sp10b | SQSLIYSIG | 187 | RVS | 156 | FQSTHL | 183 |
| | NTY | | | | PYT | |
| NOV453 | SQNINNY | 219 | NTDHLQA | 223 | LQHRSR | 215 |
| | | | GVP | | YT | |
| NOV229 | SQNINNY | 219 | NTDHLQA | 223 | LQHRSR | 215 |
| | | | GVP | | YT | |
| NOV110 | SQSLVYSH | 283 | RVS | 156 | FQSTHL | 183 |
| | GNTY | | | | PYT | |
| NOV832 | SQSLVYSH | 283 | RVS | 156 | FQSTHL | 183 |
| | GNTY | | | | PYT | |
| NOV589 | SQSLVRSD | 155 | RVS | 156 | LQSSHF | 151 |
| | GTTY | | | | PWT | |
| NOV580 | SQNIDKY | 379 | NTNNLEA | 383 | LQHRSS | 375 |
| | | | GVP | | YT | |
| NOV567 | SQSIGNS | 411 | STSTLEY | 415 | LQYATY | 407 |
| | | | GVP | | PYT | |
| NOV221 | SQNIDKY | 379 | NTNNLEA | 383 | LQHRSG | 439 |
| | | | GVP | | YT | |
| CD3_sp11a_bkm1 | SQSLVRSD | 155 | RVS | 156 | LQSSHF | 151 |
| | GTTY | | | | PWT | |
| CD3_SP11a_bkm2 | SQSLVRSD | 155 | RVS | 156 | LQSSHF | 151 |
| | GTTY | | | | PWT | |
| CD3_sp11a_hz0 | SQSLVRSD | 155 | RVS | 156 | LQSSHF | 151 |
| | GTTY | | | | PWT | |
| CD3_SP11A_HZ1 | SQSLVRSD | 155 | RVS | 156 | LQSSHF | 485 |
| | GTTY | | | | PW | |
| CD3_sp11a_sansPTM_hz1 | SQSLVRSE | 488 | RVS | 156 | LQSSHF | 151 |
| | GTTY | | | | PWT | |
| CD3_sp11a_sansPTM_rat | SQSLVRSE | 488 | RVS | 156 | LQSSHF | 151 |
| | GTTY | | | | PWT | |
| CD3_sp11a_VHVL_YY | SQSLVRSD | 155 | RVS | 156 | LQSSHF | 151 |
| | GTTY | | | | PWT | |
| CD3_SP11A_VHVL_SS | SQSLVRSD | 155 | RVS | 156 | LQSSHF | 151 |
| | GTTY | | | | PWT | |
| CD3_SP11A_VHVL_WS | SQSLVRSD | 155 | RVS | 156 | LQSSHF | 151 |
| | GTTY | | | | PWT | |
| CD3_sp11a_VHVL_SW | SQSLVRSD | 155 | RVS | 156 | LQSSHF | 151 |
| | GTTY | | | | PWT | |
| CD3_SP11A_VHVL_TT | SQSLVRSD | 155 | RVS | 156 | LQSSHF | 151 |
| | GTTY | | | | PWT | |
| CD3_SP11A_VHVL_TW | SQSLVRSD | 155 | RVS | 156 | LQSSHF | 151 |
| | GTTY | | | | PWT | |
| CD3_SP11A_VHVL_VVT | SQSLVRSD | 155 | RVS | 156 | LQSSHF | 151 |
| | GTTY | | | | PWT | |
| CD3_SP11A VH3_VLK_3 | SQSLVRSE | 488 | RVS | 156 | LQSSHF | 151 |
| | GTTY | | | | MATT | |
| CD3_sp11a_VH1_VK2 | SQSLVRSD | 155 | RVS | 156 | LQSSHF | 151 |
| | GTTY | | | | PWT | |
| CD3_SP11A_VH3_VLK1 | SQSLVRSE | 488 | RVS | 156 | LQSSHF | 151 |
| | GTTY | | | | PWT | |
| CD3_SP11A_VH5_VK2 | SQSLVRSD | 155 | RVS | 156 | LQSSHF | 151 |
| | GTTY | | | | PWT | |
| CD3_sp9aFW1_VL_VH_S5 | SQNINNY | 219 | NTDHLQA | 223 | LQHRSR | 215 |
| 6G | | | GVP | | YT | |
| CD3_SP9AFW4_VL_VH_S | SQNINNY | 219 | NTDHLQA | 223 | LQHRSR | 215 |
| 56G | | | GVP | | YT | |
| CD3_sp9aFW1_VLVH | SQNINNY | 219 | NTDHLQA | 223 | LQHRSR | 215 |
| | | | GVP | | YT | |
| CD3_sp9aFW4_VLVH | SQNINNY | 219 | NTDHLQA | 223 | LQHRSR | 215 |
| | | | GVP | | YT | |
| CD3_sp9arabtor_VHVL | SQNINNY | 219 | NTDHLQA | 223 | LQHRSR | 215 |
| | | | GVP | | YT | |
| CD3_sp9arabtor_VLVH | SQNINNY | 219 | NTDHLQA | 223 | LQHRSR | 215 |
| | | | GVP | | YT | |
| CD3_SP11AVH3_VLK_3_Y | SQSLVRSE | 488 | RVS | 156 | LQSSHF | 151 |
| | GTTY | | | | PWT | |
| CD3_SP11AVH3_VLK_3_S | SQSLVRSE | 488 | RVS | 156 | LQSSHF | 151 |
| | GTTY | | | | PWT | |
| CD3_SP11AVH3_VLK_3_Y_ | SQSLVRSD | 155 | RVS | 156 | LQSSHF | 151 |
| PTM | GTTY | | | | PWT | |
| CD3_SP11AVH3_VLK_3_S_ | SQSLVRSD | 155 | RVS | 156 | LQSSHF | 151 |
| PTM | GTTY | | | | PWT | |
| CD3_SP11AVH3_VLK_3_Y_ | SQSLVRSE | 488 | RVS | 156 | LQSSHF | 151 |
| SW | GTTY | | | | PWT | |
| CD3_SP11AVH3_VLK_3_S_ | SQSLVRSE | 488 | RVS | 156 | LQSSHF | 151 |
| SW | GTTY | | | | PWT | |
| CD3_SP11AVH3_VLK_3_Y_ | SQSLVRSD | 155 | RVS | 156 | LQSSHF | 151 |
| PTM_SW | GTTY | | | | PWT | |
| CD3_SP11AVH3_VLK_3_S_ | SQSLVRSD | 155 | RVS | 156 | LQSSHF | 151 |
| SVVPTM | GTTY | | | | PWT | |
| CD3_SP11AVH3_VLK_SW | SQSLVRSD | 155 | RVS | 156 | LQSSHF | 151 |
| PTM | GTTY | | | | PWT | |
| CD3_SP11AVH3_VLK_3_S | SQSLVRSE | 488 | RVS | 156 | LQSSHF | 151 |
| W | GTTY | | | | PWT | |
| CD3_sp11a_VH1_VK2_Y | SQSLVRSD | 155 | RVS | 156 | LQSSHF | 151 |
| | GTTY | | | | PWT | |
| CD3_sp11a_VH1_VK2_S | SQSLVRSD | 155 | RVS | 156 | LQSSHF | 151 |
| | GTTY | | | | PWT | |
| CD3_sp11a_VH1_VK2_Y_ | SQSLVRSE | 488 | RVS | 156 | LQSSHF | 151 |
| PTM | GTTY | | | | PWT | |
| CD3_sp11a_VH1_VK2_S_ | SQSLVRSE | 488 | RVS | 156 | LQSSHF | 151 |
| PTM | GTTY | | | | PWT | |
| CD3_sp11a_VH1_VK2_Y_ | SQSLVRSD | 155 | RVS | 156 | LQSSHF | 151 |
| SW | GTTY | | | | PWT | |
| CD3_sp11a_VH1_VK2_S_ | SQSLVRSD | 155 | RVS | 156 | LQSSHF | 151 |
| SW | GTTY | | | | PWT | |
| CD3_sp11a_VH1_VK2_Y_ | SQSLVRSE | 488 | RVS | 156 | LQSSHF | 151 |
| PTM | GTTY | | | | PWT | |
| CD3_sp11a_VH1_VK2_S_ | SQSLVRSE | 488 | RVS | 156 | LQSSHF | 151 |
| PTM_SW | GTTY | | | | PWT | |
| CD3_sp11a_VH1_VK2_SW | SQSLVRSD | 155 | RVS | 156 | LQSSHF | 151 |
| | GTTY | | | | PWT | |
| CD3_sp11a_VH1_VK2_SW_ | SQSLVRSE | 488 | RVS | 156 | LQSSHF | 151 |
| PTM | GTTY | | | | PWT | |
| CD3_SP11A_VH3_VLK1_Y | SQSLVRSE | 488 | RVS | 156 | LQSSHF | 151 |
| | GTTY | | | | PWT | |
| CD3_SP11A_VH3_VLK1_S | SQSLVRSE | 488 | RVS | 156 | LQSSHF | 151 |
| | GTTY | | | | PWT | |
| CD3_SP11A_VH3_VLK1_Y_ | SQSLVRSD | 155 | RVS | 156 | LQSSHF | 151 |
| PTM | GTTY | | | | PWT | |
| CD3_SP11A_VH3_VLK1_S_ | SQSLVRSD | 155 | RVS | 156 | LQSSHF | 151 |
| PTM | GTTY | | | | PWT | |
| CD3_SP11A_VH3_VLK1_Y_ | SQSLVRSE | 488 | RVS | 156 | LQSSHF | 151 |
| SW | GTTY | | | | PWT | |
| CD3_SP11A_VH3_VLK1_S_ | SQSLVRSE | 488 | RVS | 156 | LQSSHF | 151 |
| SW | GTTY | | | | PWT | |
| CD3_SP11A_VH3_VLK1_Y_ | SQSLVRSD | 155 | RVS | 156 | LQSSHF | 151 |
| PTM | GTTY | | | | PWT | |
| CD3_SP11A_VH3_VLK1_S_ | SQSLVRSD | 155 | RVS | 156 | LQSSHF | 151 |
| PTM_SW | GTTY | | | | PWT | |
| CD3_SP11A_VH3_VLK1PTM_ | SQSLVRSD | 155 | RVS | 156 | LQSSHF | 151 |
| SW | GTTY | | | | PWT | |
| CD3_SP11A_VH3_VLK1_S | SQSLVRSE | 488 | RVS | 156 | LQSSHF | 151 |
| W | GTTY | | | | PWT | |
| CD3_SP11A_VH5_VK2_Y | SQSLVRSD | 155 | RVS | 156 | LQSSHF | 151 |
| | GTTY | | | | PWT | |
| CD3_SP11A_VH5_VK2_S | SQSLVRSD | 155 | RVS | 156 | LQSSHF | 151 |
| | GTTY | | | | PWT | |
| CD3_SP11A_VH5_VK2_Y_ | SQSLVRSD | 155 | RVS | 156 | LQSSHF | 151 |
| PTM | GTTY | | | | PWT | |
| CD3_SP11A_VH5_VK2_S_ | SQSLVRSD | 155 | RVS | 156 | LQSSHF | 151 |
| PTM | GTTY | | | | PWT | |
| CD3_SP11A_VH5_VK2_Y_ | SQSLVRSD | 155 | RVS | 156 | LQSSHF | 151 |
| SW | GTTY | | | | PWT | |
| CD3_SP11A_VH5_VK2_S_ | SQSLVRSD | 155 | RVS | 156 | LQSSHF | 151 |
| SW | GTTY | | | | PWT | |
| CD3_5P11A_VH5_VK2_Y_ | SQSLVRSD | 155 | RVS | 156 | LQSSHF | 151 |
| PTM_SW | GTTY | | | | PWT | |
| CD3_SP11A_VH5_VK2_S_ | SQSLVRSD | 155 | RVS | 156 | LQSSHF | 151 |
| PTM_SW | GTTY | | | | PWT | |
| CD3_SP11A_VH5_VK2_PT | SQSLVRSD | 155 | RVS | 156 | LQSSHF | 151 |
| M_SW | GTTY | | | | PWT | |
| CD3_SP11A_VH5_VK2_S | SQSLVRSD | 155 | RVS | 156 | LQSSHF | 151 |
| W | GTTY | | | | PWT | |

TABLE 1J-1
CD3 Binders-Heavy chain variable sequences

| | | SEQ ID |
|---|---|---|
| Binder | Sequence | NO: |
| NOV292 | QVQLVESGGGVVQPGRSLRLSCAASGFTFSKNGMHVVVRQA | 145 |
| | PGKGLEVVVAMIYYDSSKMYYADTVKGRFTISRDNSKNTLYLQ | |
| | MNSLRAEDTAVYYCASFVWVDLDFDHWGQGTMVTVSS | |
| NOV123 | QVQLVQSGAEVKKPGASVKVSCKASGYTFTSYYIYWVRQAPG | 177 |
| | QRLEVVMGYIYPGHDAIYYSENFKGRVTITADTSASTAYMELSS | |
| | LRSEDTAVYYCVRPNTMMAPLAYWGQGTLVTVSS | |
| Sp10b | QVQLHQSGAELAKPGTSVNLSCKASGYTFTSYYIYVVIKRRPG | 502 |
| | QGLEWIGYIYPGHDAIYYSENFKGKATFTADTSSSTAYMLLGS | |
| | LTPEDSAYYFCVRPNTMMAPLAYWGQGTLVTVSS | |
| NOV453 | QVQLQESGPGLVKPSETLSLTCTVSGFSLTTYNVHWIRQPPG | 209 |
| | KGLEWIGRMRYSGDTSFNAALTSRVTISRDTSKNQVSLKLSSV | |
| | TAADTAVYYCTSDPMYIPNYSYGVMNAWGQGTTVTVSS | |
| NOV229 | QVQLQESGPGLVKPSETLSLTCTVSGFSLTTYNVHWIRQPPG | 241 |
| | KGLEWIGRMRYSGDTSFNAALTSRVTISVDTSKNQFSLKLSSV | |
| | TAADTAVYYCARDPMYIPNYSYGVMNAWGQGTTVTVSS | |
| NOV110 | QVQLVQSGAEVKKPGASVKVSCKASGYTFTSYYIYWVRQAPG | 273 |
| | QRLEVVMGYIYPANGGIYYSEKFKGRVTITADTSAGTAYMELSS | |
| | LRSEDTAVYYCARPVTMMAPLVFWGQGTLVTVSS | |
| NOV832 | QVQLVQSGAEVKKPGASVKVSCKASGYTFTSYYIYWVRQAPG | 305 |
| | QRLEVVMGYIYPANGGIYYSEKFKGRVTITRDTSASTAYMELSS | |
| | LRSEDTAVYYCARPVTMMAPLVFWGQGTLVTVSS | |
| NOV589 | QVQLVESGGGVVQPGRSLRLSCAASGFTFSKNGMHVVVRQA | 337 |
| | PGKGLEVVVAMIYYDSSRMYYADTVKGRFTISRDNSKNTLYLQ | |
| | MNSLRAEDTAVYYCASFVWVDLDFDYWGQGTMVTVSS | |
| NOV580 | QVQLQESGPGLVKPSETLSLTCTVSGFSLTTYNIHWIRQPPGK | 369 |
| | GLEWIGRMRYSGDTSYSSALKSRVTISRDTSKNQVSLKLSSVT | |
| | AADTAVYYCTRDPMYIPGYSYGVMNAWGQGTTVTVSS | |
| NOV567 | QVQLVESGGGVVQPGRSLRLSCAASGFAFRKYGMSVVVRQA | 401 |
| | PGKGLEVVVALIYYDSSKMNYADTVKGRFTISRDNSKNTLYLQ | |
| | MNSLRAEDTAVYYCAALNSEYDWGQGTMVTVSS | |
| NOV221 | QVQLQESGPGLVKPSETLSLTCTVSGFSLTTYNIHWIRQPPGK | 433 |
| | GLEWIGRMRYSGDTSYSSALKSRVTISRDTSKNQVSLKLSSVT | |
| | AADTAVYYCTRDPMYIPGYSYGVMNAWGQGTTVTVSS | |
| CD3_sp11a_bkm1 | QVQLVESGGGVVQPGRSLRLSCAASGFTFSKNGMHVVVRQA | 145 |
| | PGKGLEVVVAMIYYDSSKMYYADTVKGRFTISRDNSKNTLYLQ | |
| | MNSLRAEDTAVYYCASFVWVDLDFDHWGQGTMVTVSS | |
| CD3_SP11a_bkm2 | QVQLVESGGGVVQPGRSLRLSCAASGFTFSKNGMHVVVRQA | 503 |
| | PGKGLEVVVAMIYYDSSKMYYADTVKGRFTISRDNSKNTLYLQ | |
| | MNSLRAEDTAVYYCAKFVWVDLDFDHWGQGTMVTVSS | |
| CD3_sp11a_hz0 | QVQLVESGGGVVQPGRSLRLSCAASGFTFSKNGMHVVVRQA | 503 |
| | PGKGLEVVVAMIYYDSSKMYYADTVKGRFTISRDNSKNTLYLQ | |
| | MNSLRAEDTAVYYCAKFVWVDLDFDHWGQGTMVTVSS | |
| CD3_SP11A_HZ1 | QVQLVESGGGVVQPGRSLRLSCAASGFTFSKNGMHVVVRQA | 145 |
| | PGKGLEVVVAMIYYDSSKMYYADTVKGRFTISRDNSKNTLYLQ | |
| | MNSLRAEDTAVYYCASFVWVDLDFDHWGQGTMVTVSS | |
| CD3_sp11a_sansPTM_hz1 | QVQLVESGGGVVQPGRSLRLSCAASGFTFSKQGMHVVVRQA | 511 |
| | PGKGLEVVVAMIYYDSSKMYYADTVKGRFTISRDNSKNTLYLQ | |
| | MNSLRAEDTAVYYCASFVWVDLDFDHWGQGTMVTVSS | |
| CD3_sp11a_sansPTM_rat | EVKLVESGGDLVQPGDSLTLSCVASGFTFSKQGMHWIRQAPK | 496 |
| | KGLEWIAMIYYDSSKMYYADTVKGRFTISRDNSKNTLYLEMNS | |
| | LRSEDTAMYYCASFVWVDLDFDHWGQGVMVTVSS | |
| CD3_sp11a_VHVL_YY | QVQLVESGGGVVQPGRSLRLSCAASGFTFSKNGMHVVVRQA | 510 |
| | PGKGLEVVVAMIYYDSSKMYYADTVKGRFTISRDNSKNTLYLQ | |
| | MNSLRAEDTAVYYCASFYYDLDFDHWGQGTMVTVSS | |
| CD3_SP11A_VHVL_SS | QVQLVESGGGVVQPGRSLRLSCAASGFTFSKNGMHVVVRQA | 504 |
| | PGKGLEVVVAMIYYDSSKMYYADTVKGRFTISRDNSKNTLYLQ | |
| | MNSLRAEDTAVYYCASFSSDLDFDHWGQGTMVTVSS | |
| CD3_SP11A_VHVL_WS | QVQLVESGGGVVQPGRSLRLSCAASGFTFSKNGMHVVVRQA | 508 |
| | PGKGLEVVVAMIYYDSSKMYYADTVKGRFTISRDNSKNTLYLQ | |
| | MNSLRAEDTAVYYCASFWSDLDFDHWGQGTMVTVSS | |
| CD3_sp11a_VHVL_SW | QVQLVESGGGVVQPGRSLRLSCAASGFTFSKNGMHVVVRQA | 505 |
| | PGKGLEVVVAMIYYDSSKMYYADTVKGRFTISRDNSKNTLYLQ | |
| | MNSLRAEDTAVYYCASFSWDLDFDHWGQGTMVTVSS | |
| CD3_SP11A_VHVL_TT | QVQLVESGGGVVQPGRSLRLSCAASGFTFSKNGMHVVVRQA | 506 |
| | PGKGLEVVVAMIYYDSSKMYYADTVKGRFTISRDNSKNTLYLQ | |
| | MNSLRAEDTAVYYCASFTTDLDFDHWGQGTMVTVSS | |
| CD3_SP11A_VHVL_TW | QVQLVESGGGVVQPGRSLRLSCAASGFTFSKNGMHVVVRQA | 507 |
| | PGKGLEVVVAMIYYDSSKMYYADTVKGRFTISRDNSKNTLYLQ | |
| | MNSLRAEDTAVYYCASFTVVDLDFDHWGQGTMVTVSS | |
| CD3_SP11A_VHVL_VVT | QVQLVESGGGVVQPGRSLRLSCAASGFTFSKNGMHVVVRQA | 509 |
| | PGKGLEVVVAMIYYDSSKMYYADTVKGRFTISRDNSKNTLYLQ | |
| | MNSLRAEDTAVYYCASFVVTDLDFDHWGQGTMVTVSS | |
| CD3_SP11A_VH3_VLK_3 | QVQLVESGGGVVQPGRSLRLSCAASGFTFSKNGMHVVVRQA | 145 |
| | PGKGLEVVVAMIYYDSSKMYYADTVKGRFTISRDNSKNTLYLQ | |
| | MNSLRAEDTAVYYCASFVWVDLDFDHWGQGTMVTVSS | |
| CD3_sp11a_VH1_VK2 | QVQLVQSGAEVKKPGASVKVSCKASGFTFSKQGMHVVVRQA | 512 |
| | PGQGLEWMGMIYYDSSKMYYADTVKGRVTMTRDTSTNTLYM | |
| | ELSSLRSEDTAVYYCASFVWVDLDFDHWGQGTMVTVSS | |
| CD3_SP11A_VH3_VLK1 | QVQLVESGGGVVQPGRSLRLSCAASGFTFSKNGMHVVVRQA | 145 |
| | PGKGLEVVVAMIYYDSSKMYYADTVKGRFTISRDNSKNTLYLQ | |
| | MNSLRAEDTAVYYCASFVWVDLDFDHWGQGTMVTVSS | |
| CD3_SP11A_VH5_VK2 | EVQLVQSGAEVKKPGESLKISCKGSGFTFSKQGMHVVVRQMP | 501 |
| | GKGLEWMGMIYYDSSKMYYADTVKGQVTISRDNSINTLYLQW | |
| | SSLKASDTAMYYCASFVWVDLDFDHWGQGTMVTVSS | |
| CD3_sp9aFW1_VL_VH_ | EVQLVESGGGLVQPGGSLRLSCAASGFSLTTYNVHVVVRQAP | 497 |
| S56G | GKGLEVVVGRMRYSGDTSFNAALTSRFTISRDNSKNTLYLQMN | |
| | SLRAEDTAVYYCASDPMYIPNYAYGVMNAWGQGTLVTVSS | |
| CD3_SP9AFW4_VL_VH_ | EVQLVETGGGLVQPGGSRRLSCAASGFSLTTYNVHVVVRQAP | 499 |
| S56G | GKGLEVVVGRMRYSGDTSFNAALTSRFTISRDTSKNTVYLQMN | |
| | SLRAEDTGVYYCASDPMYIPNYAYGVMNAWGQGTLVTVSS | |
| CD3_sp9aFW1_VLVH | EVQLVETGGGLVQPGGSRRLSCAASGFSLTTYNVHVVVRQAP | 500 |
| | GKGLEVVVSRMRYSGDTSFNAALTSRFTISRDTSKNTVYLQMN | |
| | SLRAEDTGVYYCASDPMYIPNYAYGVMNAWGQGTLVTVSS | |
| CD3_sp9aFW4_VLVH | VQLVESGGGLVQPGGSLRLSCAASGFSLTTYNVHVVVRQAPG | 513 |
| | KGLEVVVSRMRYSGDTSFNAALTSRFTISRDNSKNTLYLQMNS | |
| | LRAEDTAVYYCASDPMYIPNYAYGVMNAWGQGTLVTVSS | |
| CD3_sp9arabtor_VHVL | EVQLVESGGGSVQPGGSLRLSCTASGFSLTTYNVHVVVRQAP | 498 |
| | GKGLEVVVGRMRYSGDTSFNAALTSRFTISRDTSKNTVYLQMN | |
| | SLRAEDTATYYCASDPMYIPNYAYGVMNAWGQGTTVTVSS | |
| CD3_sp9arabtor_VLVH | EVQLVESGGGSVQPGGSLRLSCTASGFSLTTYNVHVVVRQAP | 498 |
| | GKGLEVVVGRMRYSGDTSFNAALTSRFTISRDTSKNTVYLQMN | |
| | SLRAEDTATYYCASDPMYIPNYAYGVMNAWGQGTTVTVSS | |
| CD3_sp11a_VHVL_YY_ | QVQLVESGGGVVQPGRSLRLSCAASGFTFSKQGMHVVVRQA | 588 |
| SANSPTM | PGKGLEVVVAMIYYDSSKMYYADTVKGRFTISRDNSKNTLYLQ | |
| | MNSLRAEDTAVYYCASFYYDLDFDHWGQGTMVTVSS | |
| CD3_sp11a_VHVL_YY_ | QVQLVESGGGVVQPGRSLRLSCAASGFTFSKQGMHVVVRQA | 602 |
| SANSPTM_Y | PGKGLEVVVAMIYYDSSKMYYADTVKGRFTISRDNSKNTLYLQ | |
| | MNSLRAEDTAVYYCASYYYDLDFDHWGQGTMVTVSS | |
| CD3_sp11a_VHVL_YY_ | QVQLVESGGGVVQPGRSLRLSCAASGFTFSKQGMHVVVRQA | 595 |
| SANPTM_S | PGKGLEVVVAMIYYDSSKMYYADTVKGRFTISRDNSKNTLYLQ | |
| | MNSLRAEDTAVYYCASSYYDLDFDHWGQGTMVTVSS | |
| CD3_sp11a_VHVL_YY_Y | QVQLVESGGGVVQPGRSLRLSCAASGFTFSKNGMHVVVRQA | 571 |
| | PGKGLEVVVAMIYYDSSKMYYADTVKGRFTISRDNSKNTLYLQ | |
| | MNSLRAEDTAVYYCASYYYDLDFDHWGQGTMVTVSS | |
| CD3_sp11a_VHVL_YY_s | QVQLVESGGGVVQPGRSLRLSCAASGFTFSKNGMHVVVRQA | 577 |
| | PGKGLEVVVAMIYYDSSKMYYADTVKGRFTISRDNSKNTLYLQ | |
| | MNSLRAEDTAVYYCASSYYDLDFDHWGQGTMVTVSS | |
| CD3_sp11a_VHVL_SS_ | QVQLVESGGGVVQPGRSLRLSCAASGFTFSKQGMHVVVRQA | 583 |
| SANSPTM | PGKGLEVVVAMIYYDSSKMYYADTVKGRFTISRDNSKNTLYLQ | |
| | MNSLRAEDTAVYYCASFSSDLDFDHWGQGTMVTVSS | |
| CD3_sp11a_VHVL_SS_ | QVQLVESGGGVVQPGRSLRLSCAASGFTFSKQGMHVVVRQA | 596 |
| SANSPTM_Y | PGKGLEVVVAMIYYDSSKMYYADTVKGRFTISRDNSKNTLYLQ | |
| | MNSLRAEDTAVYYCASYSSDLDFDHWGQGTMVTVSS | |
| CD3_sp11a_VHVL_SS_ | QVQLVESGGGVVQPGRSLRLSCAASGFTFSKQGMHVVVRQA | 589 |
| SANSPTM_S | PGKGLEVVVAMIYYDSSKMYYADTVKGRFTISRDNSKNTLYLQ | |
| | MNSLRAEDTAVYYCASSSSDLDFDHWGQGTMVTVSS | |
| CD3_sp11a_VHVL_SS_Y | QVQLVESGGGVVQPGRSLRLSCAASGFTFSKNGMHVVVRQA | 570 |
| | PGKGLEVVVAMIYYDSSKMYYADTVKGRFTISRDNSKNTLYLQ | |
| | MNSLRAEDTAVYYCASYSSDLDFDHWGQGTMVTVSS | |
| CD3_sp11a_VHVL_SS_S | QVQLVESGGGVVQPGRSLRLSCAASGFTFSKNGMHVVVRQA | 572 |
| | PGKGLEVVVAMIYYDSSKMYYADTVKGRFTISRDNSKNTLYLQ | |
| | MNSLRAEDTAVYYCASSSSDLDFDHWGQGTMVTVSS | |
| CD3_sp11 a_VHVL_SS_ | QVQLVESGGGVVQPGRSLRLSCAASGFTFSKQGMHVVVRQA | 583 |
| SANSPTM | PGKGLEVVVAMIYYDSSKMYYADTVKGRFTISRDNSKNTLYLQ | |
| | MNSLRAEDTAVYYCASFSSDLDFDHWGQGTMVTVSS | |
| CD3_sp11a_VHVL_WS_ | QVQLVESGGGVVQPGRSLRLSCAASGFTFSKQGMHVVVRQA | 600 |
| SANSPTM _Y | PGKGLEVVVAMIYYDSSKMYYADTVKGRFTISRDNSKNTLYLQ | |
| | MNSLRAEDTAVYYCASYWSDLDFDHWGQGTMVTVSS | |
| CD3_sp11a_VHVL_WS_ | QVQLVESGGGVVQPGRSLRLSCAASGFTFSKQGMHVVVRQA | 593 |
| SANSPTM_S | PGKGLEVVVAMIYYDSSKMYYADTVKGRFTISRDNSKNTLYLQ | |
| | MNSLRAEDTAVYYCASSWSDLDFDHWGQGTMVTVSS | |
| CD3_sp11a_VHVL_WS_Y | QVQLVESGGGVVQPGRSLRLSCAASGFTFSKNGMHVVVRQA | 581 |
| | PGKGLEVVVAMIYYDSSKMYYADTVKGRFTISRDNSKNTLYLQ | |
| | MNSLRAEDTAVYYCASYWSDLDFDHWGQGTMVTVSS | |
| CD3_sp11a_VHVL_WS_S | QVQLVESGGGVVQPGRSLRLSCAASGFTFSKNGMHVVVRQA | 569 |
| | PGKGLEVVVAMIYYDSSKMYYADTVKGRFTISRDNSKNTLYLQ | |
| | MNSLRAEDTAVYYCASSWSDLDFDHWGQGTMVTVSS | |
| CD3_sp11a_VHVL_WS_ | QVQLVESGGGVVQPGRSLRLSCAASGFTFSKQGMHVVVRQA | 587 |
| SANSPTM | PGKGLEVVVAMIYYDSSKMYYADTVKGRFTISRDNSKNTLYLQ | |
| | MNSLRAEDTAVYYCASFWSDLDFDHWGQGTMVTVSS | |
| CD3_sp11a_VHVL_SW_ | QVQLVESGGGVVQPGRSLRLSCAASGFTFSKQGMHVVVRQA | 597 |
| SANSPTM_Y | PGKGLEVVVAMIYYDSSKMYYADTVKGRFTISRDNSKNTLYLQ | |
| | MNSLRAEDTAVYYCASYSWDLDFDHWGQGTMVTVSS | |
| CD3_sp11a_VHVL_SW_ | QVQLVESGGGVVQPGRSLRLSCAASGFTFSKQGMHVVVRQA | 590 |
| SANSPTM_S | PGKGLEVVVAMIYYDSSKMYYADTVKGRFTISRDNSKNTLYLQ | |
| | MNSLRAEDTAVYYCASSSWDLDFDHWGQGTMVTVSS | |
| CD3_sp11a_VHVL_SW_Y | QVQLVESGGGVVQPGRSLRLSCAASGFTFSKNGMHVVVRQA | 578 |
| | PGKGLEVVVAMIYYDSSKMYYADTVKGRFTISRDNSKNTLYLQ | |
| | MNSLRAEDTAVYYCASYSWDLDFDHWGQGTMVTVSS | |
| CD3_sp11a_VHVL_SW_S | QVQLVESGGGVVQPGRSLRLSCAASGFTFSKNGMHVVVRQA | 573 |
| | PGKGLEVVVAMIYYDSSKMYYADTVKGRFTISRDNSKNTLYLQ | |
| | MNSLRAEDTAVYYCASSSWDLDFDHWGQGTMVTVSS | |
| CD3_sp11a_VHVL_SW_ | QVQLVESGGGVVQPGRSLRLSCAASGFTFSKQGMHVVVRQA | 584 |
| SANSPTM | PGKGLEVVVAMIYYDSSKMYYADTVKGRFTISRDNSKNTLYLQ | |
| | MNSLRAEDTAVYYCASFSWDLDFDHWGQGTMVTVSS | |
| CD3_sp11a_VHVL_TW_ | QVQLVESGGGVVQPGRSLRLSCAASGFTFSKQGMHVVVRQA | 599 |
| SANSPTM_Y | PGKGLEVVVAMIYYDSSKMYYADTVKGRFTISRDNSKNTLYLQ | |
| | MNSLRAEDTAVYYCASYTWDLDFDHWGQGTMVTVSS | |
| CD3_sp11a_VHVL_TW_ | QVQLVESGGGVVQPGRSLRLSCAASGFTFSKQGMHVVVRQA | 592 |
| SANSPTM _S | PGKGLEVVVAMIYYDSSKMYYADTVKGRFTISRDNSKNTLYLQ | |
| | MNSLRAEDTAVYYCASSTWDLDFDHWGQGTMVTVSS | |
| CD3_sp11a_VHVL_TW_Y | QVQLVESGGGVVQPGRSLRLSCAASGFTFSKNGMHVVVRQA | 580 |
| | PGKGLEVVVAMIYYDSSKMYYADTVKGRFTISRDNSKNTLYLQ | |
| | MNSLRAEDTAVYYCASYTWDLDFDHWGQGTMVTVSS | |
| CD3_sp11a_VHVL_TW_S | QVQLVESGGGVVQPGRSLRLSCAASGFTFSKNGMHVVVRQA | 575 |
| | PGKGLEVVVAMIYYDSSKMYYADTVKGRFTISRDNSKNTLYLQ | |
| | MNSLRAEDTAVYYCASSTWDLDFDHWGQGTMVTVSS | |
| CD3_sp11a_VHVL_T_ | WQVQLVESGGGVVQPGRSLRLSCAASGFTFSKQGMHVVVRQA | 586 |
| SANSPTM | PGKGLEVVVAMIYYDSSKMYYADTVKGRFTISRDNSKNTLYLQ | |
| | MNSLRAEDTAVYYCASFTVVDLDFDHWGQGTMVTVSS | |
| CD3_sp11a_VHVL_TT_ | QVQLVESGGGVVQPGRSLRLSCAASGFTFSKQGMHVVVRQA | 598 |
| SANSPTM_Y | PGKGLEVVVAMIYYDSSKMYYADTVKGRFTISRDNSKNTLYLQ | |
| | MNSLRAEDTAVYYCASYTTDLDFDHWGQGTMVTVSS | |
| CD3_sp11a_VHVL_TT_S | QVQLVESGGGVVQPGRSLRLSCAASGFTFSKQGMHVVVRQA | 591 |
| ANSPTM_S | PGKGLEVVVAMIYYDSSKMYYADTVKGRFTISRDNSKNTLYLQ | |
| | MNSLRAEDTAVYYCASSTTDLDFDHWGQGTMVTVSS | |
| CD3_sp11a_VHVL_TT_Y | QVQLVESGGGVVQPGRSLRLSCAASGFTFSKNGMHVVVRQA | 579 |
| | PGKGLEVVVAMIYYDSSKMYYADTVKGRFTISRDNSKNTLYLQ | |
| | MNSLRAEDTAVYYCASYTTDLDFDHWGQGTMVTVSS | |
| CD3_sp11a_VHVL_TT_S | QVQLVESGGGVVQPGRSLRLSCAASGFTFSKNGMHVVVRQA | 574 |
| | PGKGLEVVVAMIYYDSSKMYYADTVKGRFTISRDNSKNTLYLQ | |
| | MNSLRAEDTAVYYCASSTTDLDFDHWGQGTMVTVSS | |
| CD3_sp11a_VHVL_TT_S | QVQLVESGGGVVQPGRSLRLSCAASGFTFSKQGMHVVVRQA | 585 |
| ANSPTM | PGKGLEVVVAMIYYDSSKMYYADTVKGRFTISRDNSKNTLYLQ | |
| | MNSLRAEDTAVYYCASFTTDLDFDHWGQGTMVTVSS | |
| CD3_SP11AVH3_VLK_3_Y | QVQLVESGGGVVQPGRSLRLSCAASGFTFSKNGMHVVVRQA | 582 |
| | PGKGLEVVVAMIYYDSSKMYYADTVKGRFTISRDNSKNTLYLQ | |
| | MNSLRAEDTAVYYCASYVWVDLDFDHWGQGTMVTVSS | |
| CD3_SP11AVH3_VLK_3_S | QVQLVESGGGVVQPGRSLRLSCAASGFTFSKNGMHVVVRQA | 576 |
| | PGKGLEVVVAMIYYDSSKMYYADTVKGRFTISRDNSKNTLYLQ | |
| | MNSLRAEDTAVYYCASSVWVDLDFDHWGQGTMVTVSS | |
| CD3_SP11AVH3_VLK_3_ | QVQLVESGGGVVQPGRSLRLSCAASGFTFSKNGMHVVVRQA | 582 |
| Y_PTM | PGKGLEVVVAMIYYDSSKMYYADTVKGRFTISRDNSKNTLYLQ | |
| | MNSLRAEDTAVYYCASYVWVDLDFDHWGQGTMVTVSS | |
| CD3_SP11AVH3_VLK_3_ | QVQLVESGGGVVQPGRSLRLSCAASGFTFSKNGMHVVVRQA | 576 |
| S_PTM | PGKGLEVVVAMIYYDSSKMYYADTVKGRFTISRDNSKNTLYLQ | |
| | MNSLRAEDTAVYYCASSVWVDLDFDHWGQGTMVTVSS | |
| CD3_SP11AVH3_VLK_3_ | QVQLVESGGGVVQPGRSLRLSCAASGFTFSKNGMHVVVRQA | 578 |
| Y_SW | PGKGLEVVVAMIYYDSSKMYYADTVKGRFTISRDNSKNTLYLQ | |
| | MNSLRAEDTAVYYCASYSWDLDFDHWGQGTMVTVSS | |
| CD3_SP11AVH3_VLK_3_ | QVQLVESGGGVVQPGRSLRLSCAASGFTFSKNGMHVVVRQA | 573 |
| S_SW | PGKGLEVVVAMIYYDSSKMYYADTVKGRFTISRDNSKNTLYLQ | |
| | MNSLRAEDTAVYYCASSSWDLDFDHWGQGTMVTVSS | |
| CD3_SP11AVH3_VLK_3_ | QVQLVESGGGVVQPGRSLRLSCAASGFTFSKNGMHVVVRQA | 578 |
| Y_PTM_SW | PGKGLEVVVAMIYYDSSKMYYADTVKGRFTISRDNSKNTLYLQ | |
| | MNSLRAEDTAVYYCASYSWDLDFDHWGQGTMVTVSS | |
| CD3_SP11AVH3_VLK_3_ | QVQLVESGGGVVQPGRSLRLSCAASGFTFSKNGMHVVVRQA | 573 |
| S_SVVPTM | PGKGLEVVVAMIYYDSSKMYYADTVKGRFTISRDNSKNTLYLQ | |
| | MNSLRAEDTAVYYCASSSWDLDFDHWGQGTMVTVSS | |
| CD3_SP11AVH3_VLK_S | QVQLVESGGGVVQPGRSLRLSCAASGFTFSKNGMHVVVRQA | 505 |
| VVPTM | PGKGLEVVVAMIYYDSSKMYYADTVKGRFTISRDNSKNTLYLQ | |
| | MNSLRAEDTAVYYCASFSWDLDFDHWGQGTMVTVSS | |
| CD3_SP11AVH3_VLK_3_ | QVQLVESGGGVVQPGRSLRLSCAASGFTFSKNGMHVVVRQA | 505 |
| SW | PGKGLEVVVAMIYYDSSKMYYADTVKGRFTISRDNSKNTLYLQ | |
| | MNSLRAEDTAVYYCASFSWDLDFDHWGQGTMVTVSS | |
| CD3_sp11a_VH1_VK2_Y | QVQLVQSGAEVKKPGASVKVSCKASGFTFSKQGMHVVVRQA | 612 |
| | PGQGLEWMGMIYYDSSKMYYADTVKGRVTMTRDTSTNTLYM | |
| | ELSSLRSEDTAVYYCASYVWVDLDFDHWGQGTMVTVSS | |
| CD3_sp11a_VH1_VK2_S | QVQLVQSGAEVKKPGASVKVSCKASGFTFSKQGMHVVVRQA | 610 |
| | PGQGLEWMGMIYYDSSKMYYADTVKGRVTMTRDTSTNTLYM | |
| | ELSSLRSEDTAVYYCASSVWVDLDFDHWGQGTMVTVSS | |
| CD3_sp11a_VH1_VK2_Y_ | QVQLVQSGAEVKKPGASVKVSCKASGFTFSKNGMHVVVRQAP | 604 |
| PTM | GQGLEVVMGMIYYDSSKMYYADTVKGRVTMTRDTSTNTLYME | |
| | LSSLRSEDTAVYYCASYVWVDLDFDHWGQGTMVTVSS | |
| CD3_sp11a_VH1_VK2_S_ | QVQLVQSGAEVKKPGASVKVSCKASGFTFSKQGMHVVVRQA | 607 |
| PTM | PGNGLEWMGMIYYDSSKMYYADTVKGRVTMTRDTSTNTLYM | |
| | ELSSLRSEDTAVYYCASSVWVDLDFDHWGQGTMVTVSS | |
| CD3_sp11a_VH1_VK2_Y_ | QVQLVQSGAEVKKPGASVKVSCKASGFTFSKQGMHVVVRQA | 611 |
| SW | PGQGLEWMGMIYYDSSKMYYADTVKGRVTMTRDTSTNTLYM | |
| | ELSSLRSEDTAVYYCASYSWDLDFDHWGQGTMVTVSS | |
| CD3_sp11a_VH1_VK2_S_ | QVQLVQSGAEVKKPGASVKVSCKASGFTFSKQGMHVVVRQA | 609 |
| SW | PGQGLEWMGMIYYDSSKMYYADTVKGRVTMTRDTSTNTLYM | |
| | ELSSLRSEDTAVYYCASSSWDLDFDHWGQGTMVTVSS | |
| CD3_sp11a_VH1_VK2_Y_ | QVQLVQSGAEVKKPGASVKVSCKASGFTFSKNGMHVVVRQAP | 603 |
| PTM | GQGLEVVMGMIYYDSSKMYYADTVKGRVTMTRDTSTNTLYME | |
| | LSSLRSEDTAVYYCASYSWDLDFDHWGQGTMVTVSS | |
| CD3_sp11a_VH1_VK2_S_ | QVQLVQSGAEVKKPGASVKVSCKASGFTFSKQGMHVVVRQA | 606 |
| PTM_SW | PGNGLEWMGMIYYDSSKMYYADTVKGRVTMTRDTSTNTLYM | |
| | ELSSLRSEDTAVYYCASSSWDLDFDHWGQGTMVTVSS | |
| CD3_sp11a_VH1_VK2_SW | QVQLVQSGAEVKKPGASVKVSCKASGFTFSKQGMHVVVRQA | 608 |
| | PGQGLEWMGMIYYDSSKMYYADTVKGRVTMTRDTSTNTLYM | |
| | ELSSLRSEDTAVYYCASFSWDLDFDHWGQGTMVTVSS | |
| CD3_sp11a_VH1_VK2_S | QVQLVQSGAEVKKPGASVKVSCKASGFTFSKQGMHVVVRQA | 605 |
| WPTM | PGNGLEWMGMIYYDSSKMYYADTVKGRVTMTRDTSTNTLYM | |
| | ELSSLRSEDTAVYYCASFSWDLDFDHWGQGTMVTVSS | |
| CD3_SP11A_VH3_VLK1_Y | QVQLVESGGGVVQPGRSLRLSCAASGFTFSKNGMHVVVRQA | 582 |
| | PGKGLEVVVAMIYYDSSKMYYADTVKGRFTISRDNSKNTLYLQ | |
| | MNSLRAEDTAVYYCASYVWVDLDFDHWGQGTMVTVSS | |
| CD3_SP11A_VH3_VLK1_S | QVQLVESGGGVVQPGRSLRLSCAASGFTFSKNGMHVVVRQA | 576 |
| | PGKGLEVVVAMIYYDSSKMYYADTVKGRFTISRDNSKNTLYLQ | |
| | MNSLRAEDTAVYYCASSVWVDLDFDHWGQGTMVTVSS | |
| CD3_SP11A_VH3_VLK1_ | QVQLVESGGGVVQPGRSLRLSCAASGFTFSKQGMHVVVRQA | 601 |
| Y_PTM | PGKGLEVVVAMIYYDSSKMYYADTVKGRFTISRDNSKNTLYLQ | |
| | MNSLRAEDTAVYYCASYVWVDLDFDHWGQGTMVTVSS | |
| CD3_SP11A_VH3_VLK1_ | QVQLVESGGGVVQPGRSLRLSCAASGFTFSKQGMHVVVRQA | 594 |
| S_PTM | PGKGLEVVVAMIYYDSSKMYYADTVKGRFTISRDNSKNTLYLQ | |
| | MNSLRAEDTAVYYCASSVWVDLDFDHWGQGTMVTVSS | |
| CD3_SP11A_VH3_VLK1 | QVQLVESGGGVVQPGRSLRLSCAASGFTFSKNGMHVVVRQA | 578 |
| Y_SW | PGKGLEVVVAMIYYDSSKMYYADTVKGRFTISRDNSKNTLYLQ | |
| | MNSLRAEDTAVYYCASYSWDLDFDHWGQGTMVTVSS | |
| CD3_SP11A_VH3_VLK1_ | QVQLVESGGGVVQPGRSLRLSCAASGFTFSKNGMHVVVRQA | 576 |
| S_SW | PGKGLEVVVAMIYYDSSKMYYADTVKGRFTISRDNSKNTLYLQ | |
| | MNSLRAEDTAVYYCASSVWVDLDFDHWGQGTMVTVSS | |
| CD3_SP11A_VH3_VLK1_ | QVQLVESGGGVVQPGRSLRLSCAASGFTFSKQGMHVVVRQA | 601 |
| Y_PTM | PGKGLEVVVAMIYYDSSKMYYADTVKGRFTISRDNSKNTLYLQ | |
| | MNSLRAEDTAVYYCASYVWVDLDFDHWGQGTMVTVSS | |
| CD3_SP11A_VH3_VLK1_ | QVQLVESGGGVVQPGRSLRLSCAASGFTFSKQGMHVVVRQA | 590 |
| S_PTM_SW | PGKGLEVVVAMIYYDSSKMYYADTVKGRFTISRDNSKNTLYLQ | |
| | MNSLRAEDTAVYYCASSSWDLDFDHWGQGTMVTVSS | |
| CD3_SP11A_VH3_VLK1 | QVQLVESGGGVVQPGRSLRLSCAASGFTFSKQGMHVVVRQA | 584 |
| PTM_SW | PGKGLEVVVAMIYYDSSKMYYADTVKGRFTISRDNSKNTLYLQ | |
| | MNSLRAEDTAVYYCASFSWDLDFDHWGQGTMVTVSS | |
| CD3_SP11A_VH3_VLK1_ | QVQLVESGGGVVQPGRSLRLSCAASGFTFSKNGMHVVVRQA | 505 |
| SW | PGKGLEVVVAMIYYDSSKMYYADTVKGRFTISRDNSKNTLYLQ | |
| | MNSLRAEDTAVYYCASFSWDLDFDHWGQGTMVTVSS | |
| CD3_SP11A_VH5_VK2_Y | EVQLVQSGAEVKKPGESLKISCKGSGFTFSKQGMHVVVRQMP | 566 |
| | GKGLEWMGMIYYDSSKMYYADTVKGQVTISRDNSINTLYLQW | |
| | SSLKASDTAMYYCASYVWVDLDFDHWGQGTMVTVSS | |
| CD3_SP11A_VH5_VK2_S | EVQLVQSGAEVKKPGESLKISCKGSGFTFSKQGMHVVVRQMP | 564 |
| | GKGLEWMGMIYYDSSKMYYADTVKGQVTISRDNSINTLYLQW | |
| | SSLKASDTAMYYCASSVWVDLDFDHWGQGTMVTVSS | |
| CD3_SP11A_VH5_VK2_ | EVQLVQSGAEVKKPGESLKISCKGSGFTFSKNGMHVVVRQMP | 561 |
| Y_PTM | GKGLEWMGMIYYDSSKMYYADTVKGQVTISRDNSINTLYLQW | |
| | SSLKASDTAMYYCASYVWVDLDFDHWGQGTMVTVSS | |
| CD3_SP11A_VH5_VK2_ | EVQLVQSGAEVKKPGESLKISCKGSGFTFSKNGMHVVVRQMP | 559 |
| S_PTM | GKGLEWMGMIYYDSSKMYYADTVKGQVTISRDNSINTLYLQW | |
| | SSLKASDTAMYYCASSVWVDLDFDHWGQGTMVTVSS | |
| CD3_SP11A_VH5_VK2_ | EVQLVQSGAEVKKPGESLKISCKGSGFTFSKQGMHVVVRQMP | 565 |
| Y_SW | GKGLEWMGMIYYDSSKMYYADTVKGQVTISRDNSINTLYLQW | |
| | SSLKASDTAMYYCASYSVVDLDFDHWGQGTMVTVSS | |
| CD3_SP11A_VH5_VK2_ | EVQLVQSGAEVKKPGESLKISCKGSGFTFSKQGMHVVVRQMP | 563 |
| S_SW | GKGLEWMGMIYYDSSKMYYADTVKGQVTISRDNSINTLYLQW | |
| | SSLKASDTAMYYCASSSVVDLDFDHWGQGTMVTVSS | |
| CD3_SP11A_VH5_VK2_ | EVQLVQSGAEVKKPGESLKISCKGSGFTFSKNGMHVVVRQMP | 560 |
| Y_PTM_SW | GKGLEWMGMIYYDSSKMYYADTVKGQVTISRDNSINTLYLQW | |
| | SSLKASDTAMYYCASYSVVDLDFDHWGQGTMVTVSS | |
| CD3_SP11A_VH5_VK2_ | EVQLVQSGAEVKKPGESLKISCKGSGFTFSKNGMHVVVRQMP | 558 |
| S_PTM_SW | GKGLEWMGMIYYDSSKMYYADTVKGQVTISRDNSINTLYLQW | |
| | SSLKASDTAMYYCASSSVVDLDFDHWGQGTMVTVSS | |
| CD3_SP11A_VH5_VK2_ | EVQLVQSGAEVKKPGESLKISCKGSGFTFSKNGMHVVVRQMP | 557 |
| PTM_SW | GKGLEWMGMIYYDSSKMYYADTVKGQVTISRDNSINTLYLQW | |
| | SSLKASDTAMYYCASFSVVDLDFDHWGQGTMVTVSS | |
| CD3_SP11A_VH5_VK2_ | EVQLVQSGAEVKKPGESLKISCKGSGFTFSKQGMHVVVRQMP | 562 |
| SW | GKGLEWMGMIYYDSSKMYYADTVKGQVTISRDNSINTLYLQW | |
| | SSLKASDTAMYYCASFSVVDLDFDHWGQGTMVTVSS | |

TABLE 1J-2
CD3 Binders - Light chain variable sequences

| | | SEQ ID |
|---|---|---|
| Binder | Sequence | NO: |
| NOV292 | DIVMTQTPLSSPVTLGQPASISCRSSQSLVRSDGTTYFNVVYQ | 161 |
| | QRPGQPPRLLIYRVSNRFSGVPDRFSGSGAGTDFTLKISRVEA | |
| | EDVGVYYCLQSSHFPVVTFGGGTKVEIK | |
| NOV123 | DVVMTQSPLSLPVTLGQPASISCRSSQSLIYSIGNTYLHVVYQQ | 193 |
| | RPGQSPRLLIYRVSNRFSGVPDRFSGSGSGTDFTLKISRVEAE | |
| | DVGVYYCFQSTHLPYTFGQGTKLEIK | |
| Sp10b | VVVLTQTPVSLPVSLGGQASISCRSSQSLIYSIGNTYLHVVYLQ | 514 |
| | KPGQSPQLLIYRVSNRFSGVPDRFSGSGSGTDFTLKISRVEPE | |
| | DLGDYYCFQSTHLPYTFGAGTKLELK | |
| NOV453 | DIQMTQSPSSLSASVGDRVTITCKASQNINNYLNVVYQQKPGK | 225 |
| | APKLLIYNTDHLQAGVPSRFSGSGSGTDYTLTISSLQPEDFATY | |
| | FCLQHRSRYTFGPGTKVDIK | |
| NOV229 | DIQMTQSPSSLSASVGDRVTITCKASQNINNYLNVVYQQKPGK | 257 |
| | APKLLIYNTDHLQAGVPSRFSGSGSGTDFTLTISSLQPEDFATY | |
| | YCLQHRSRYTFGPGTKVDIK | |
| NOV110 | DVVMTQSPLSLPVTLGQPASISCRSSQSLVYSHGNTYLHVVYQ | 289 |
| | QRPGQSPRLLIYRVSNRFSGVPDRFSGSGSGTDFTLKISRVEA | |
| | EDVGVYYCFQSTHLPYTFGQGTKLEIK | |
| NOV832 | DVVMTQSPLSLPVTLGQPASISCRSSQSLVYSHGNTYLHVVFQ | 321 |
| | QRPGQSPRRLIYRVSNRFSGVPDRFSGSGSGTDFTLKISRVE | |
| | AEDVGVYYCFQSTHLPYTFGQGTKLEIK | |
| NOV589 | DIVMTQTPLSSPVTLGQPASISCRSSQSLVRSDGTTYFNVVYQ | 353 |
| | QRPGQPPRLLIYRVSNRFSGVPDRFSGSGAGTDFTLKISRVEA | |
| | EDVGVYYCLQSSHFPVVTFGGGTKVEIK | |
| NOV580 | DIQMTQSPSSLSASVGDRVTITCKTSQNIDKYLNVVYQQKPGK | 385 |
| | APKLLIYNTNNLEAGVPSRFSGSGSGTDYTFTISSLQPEDIATY | |
| | FCLQHRSSYTFGQGTKLEIK | |
| NOV567 | DIQMTQSPSSLSASVGDRVTITCRGSQSIGNSLNVVYQQKPGK | 417 |
| | APKRLIYSTSTLEYGVPSRFSGSGSGTEYTLTISSLQPEDFATY | |
| | YCLQYATYPYTFGQGTKLEIK | |
| NOV221 | DIQMTQSPSSLSASVGDRVTITCKSSQNIDKYLNVVYQQKPGK | 449 |
| | APKLLIYNTNNLEAGVPSRFSGSGSGTDYTFTISSLQPEDIATY | |
| | FCLQHRSGYTFGQGTKLEIK | |
| CD3_sp11a_bkm1 | DIVMTQTPLSSPVTLGQPASISCRSSQSLVRSDGTTYFNVVLQ | 491 |
| | QRPGQPPRLLIYRVSNRFSGVPDRFSGSGAGTDFTLKISRVEA | |
| | EDVGVYYCLQSSHFPVVTFGGGTKVEIK | |
| CD3_SP11a_bkm2 | DIVMTQTPLSSPVTLGQPASISCRSSQSLVRSDGTTYFNVVYQ | 161 |
| | QRPGQPPRLLIYRVSNRFSGVPDRFSGSGAGTDFTLKISRVEA | |
| | EDVGVYYCLQSSHFPVVTFGGGTKVEIK | |
| CD3_sp11a_hz0 | DIVMTQTPLSSPVTLGQPASISCRSSQSLVRSDGTTYFNVVLQ | 491 |
| | QRPGQPPRLLIYRVSNRFSGVPDRFSGSGAGTDFTLKISRVEA | |
| | EDVGVYYCLQSSHFPVVTFGGGTKVEIK | |
| CD3_SP11A_HZ1 | DIVMTQTPLSSPVTLGQPASISCRSSQSLVRSDGTTYFNVVYQ | 492 |
| | QRPGQPPRLLIYRVSNRFSGVPDRFSGSGAGTDFTLKISRVEA | |
| | EDVGVYYCLQSSH | |
| CD3_sp11a_sansPTM_hz1 | DIVMTQTPLSSPVTLGQPASISCRSSQSLVRSEGTTYFNVVYQ | 493 |
| | QRPGQPPRLLIYRVSNRFSGVPDRFSGSGAGTDFTLKISRVEA | |
| | EDVGVYYCLQSSHFPVVTFGGGTKVEIK | |
| CD3_sp11a_sansPTM_rat | DILVTQTPVSLPVSLGGHVSISCRSSQSLVRSEGTTYFNVVYLQ | 489 |
| | KPGQSPQLLIYRVSNRFSGVPDRFSGSGSGTDFTLKISRVEPE | |
| | DLGVYYCLQSSHFPVVTFGGGTKLELK | |
| CD3_sp11a_VHVL_YY | DIVMTQTPLSSPVTLGQPASISCRSSQSLVRSDGTTYFNVVYQ | 161 |
| | QRPGQPPRLLIYRVSNRFSGVPDRFSGSGAGTDFTLKISRVEA | |
| | EDVGVYYCLQSSHFPVVTFGGGTKVEIK | |
| CD3_SP11A_VHVL_SS | DIVMTQTPLSSPVTLGQPASISCRSSQSLVRSDGTTYFNVVYQ | 161 |
| | QRPGQPPRLLIYRVSNRFSGVPDRFSGSGAGTDFTLKISRVEA | |
| | EDVGVYYCLQSSHFPVVTFGGGTKVEIK | |
| CD3_SP11A_VHVL_WS | DIVMTQTPLSSPVTLGQPASISCRSSQSLVRSDGTTYFNVVYQ | 161 |
| | QRPGQPPRLLIYRVSNRFSGVPDRFSGSGAGTDFTLKISRVEA | |
| | EDVGVYYCLQSSHFPVVTFGGGTKVEIK | |
| CD3_sp11a_VHVL_SW | DIVMTQTPLSSPVTLGQPASISCRSSQSLVRSDGTTYFNVVYQ | 161 |
| | QRPGQPPRLLIYRVSNRFSGVPDRFSGSGAGTDFTLKISRVEA | |
| | EDVGVYYCLQSSHFPVVTFGGGTKVEIK | |
| CD3_SP11A_VHVL_TT | DIVMTQTPLSSPVTLGQPASISCRSSQSLVRSDGTTYFNVVYQ | 161 |
| | QRPGQPPRLLIYRVSNRFSGVPDRFSGSGAGTDFTLKISRVEA | |
| | EDVGVYYCLQSSHFPVVTFGGGTKVEIK | |
| CD3_SP11A_VHVL_TW | DIVMTQTPLSSPVTLGQPASISCRSSQSLVRSDGTTYFNVVYQ | 161 |
| | QRPGQPPRLLIYRVSNRFSGVPDRFSGSGAGTDFTLKISRVEA | |
| | EDVGVYYCLQSSHFPVVTFGGGTKVEIK | |
| CD3_SP11A_VHVL_VVT | DIVMTQTPLSSPVTLGQPASISCRSSQSLVRSDGTTYFNVVYQ | 161 |
| | QRPGQPPRLLIYRVSNRFSGVPDRFSGSGAGTDFTLKISRVEA | |
| | EDVGVYYCLQSSHFPVVTFGGGTKVEIK | |
| CD3_SP11A VH3_VLK_3 | EIVLTQSPGTLSLSPGERATLSCRSSQSLVRSEGTTYFNVVYQ | 494 |
| | QKPGQAPRLLIYRVSNRFSGIPDRFSGSGSGTDFTLTISRLEPE | |
| | DLAVYYCLQSSHFPVVTFGGGTKVEIK | |
| CD3_sp11a_VH1_VK2 | DIVMTQTPLSSPVTLGQPASISCRSSQSLVRSDGTTYFNVVYQ | 161 |
| | QRPGQPPRLLIYRVSNRFSGVPDRFSGSGAGTDFTLKISRVEA | |
| | EDVGVYYCLQSSHFPVVTFGGGTKVEIK | |
| CD3_SP11A_VH3_VLK1 | DIQMTQSPSSLSASVGDRVTITCRSSQSLVRSEGTTYFNVVYQ | 490 |
| | QKPGKAPKLLIYRVSNRFSGVPSRFSGSGSGTDFTLTISSLQP | |
| | EDFATYYCLQSSHFPVVTFGGGTKVEIK | |
| CD3_SP11A_VH5_VK2 | DIVMTQTPLSSPVTLGQPASISCRSSQSLVRSDGTTYFNVVYQ | 161 |
| | QRPGQPPRLLIYRVSNRFSGVPDRFSGSGAGTDFTLKISRVEA | |
| | EDVGVYYCLQSSHFPVVTFGGGTKVEIK | |
| CD3_sp9aFW1_VL_VH_ | EIVMTQSPSTLSASVGDRVIITCKASQNINNYLNVVYQQKPGKA | 495 |
| S56G | PKLLIYNTDHLQAGVPSRFSGSGSGAEFTLTISSLQPDDFATYY | |
| | CLQHRSRYTFGQGTKLTVL | |
| CD3_SP9AFW4_VL_VH_ | EIVMTQSPSTLSASVGDRVIITCKASQNINNYLNVVYQQKPGKA | 495 |
| S56G | PKLLIYNTDHLQAGVPSRFSGSGSGAEFTLTISSLQPDDFATYY | |
| | CLQHRSRYTFGQGTKLTVL | |
| CD3_sp9aFW1_VLVH | EIVMTQSPSTLSASVGDRVIITCKASQNINNYLNVVYQQKPGKA | 495 |
| | PKLLIYNTDHLQAGVPSRFSGSGSGAEFTLTISSLQPDDFATYY | |
| | CLQHRSRYTFGQGTKLTVL | |
| CD3_sp9aFW4_VLVH | EIVMTQSPSTLSASVGDRVIITCKASQNINNYLNVVYQQKPGKA | 495 |
| | PKLLIYNTDHLQAGVPSRFSGSGSGAEFTLTISSLQPDDFATYY | |
| | CLQHRSRYTFGQGTKLTVL | |
| CD3_sp9arabtor_VHVL | EIVMTQSPSTLSASVGDRVIITCKASQNINNYLNVVYQQKPGKA | 495 |
| | PKLLIYNTDHLQAGVPSRFSGSGSGAEFTLTISSLQPDDFATYY | |
| | CLQHRSRYTFGQGTKLTVL | |
| CD3_sp9arabtor_VLVH | EIVMTQSPSTLSASVGDRVIITCKASQNINNYLNVVYQQKPGKA | 495 |
| | PKLLIYNTDHLQAGVPSRFSGSGSGAEFTLTISSLQPDDFATYY | |
| | CLQHRSRYTFGQGTKLTVL | |
| CD3_sp11a_VHVL_YY_ | DIVMTQTPLSSPVTLGQPASISCRSSQSLVRSEGTTYFNVVYQ | 493 |
| SANSPTM | QRPGQPPRLLIYRVSNRFSGVPDRFSGSGAGTDFTLKISRVEA | |
| | EDVGVYYCLQSSHFPVVTFGGGTKVEIK | |
| CD3_sp11a_VHVL_YY_ | DIVMTQTPLSSPVTLGQPASISCRSSQSLVRSEGTTYFNVVYQ | 493 |
| SANSPTM_Y | QRPGQPPRLLIYRVSNRFSGVPDRFSGSGAGTDFTLKISRVEA | |
| | EDVGVYYCLQSSHFPVVTFGGGTKVEIK | |
| CD3_sp11a_VHVL_YY_ | DIVMTQTPLSSPVTLGQPASISCRSSQSLVRSEGTTYFNVVYQ | 493 |
| SANSPTM_S | QRPGQPPRLLIYRVSNRFSGVPDRFSGSGAGTDFTLKISRVEA | |
| | EDVGVYYCLQSSHFPVVTFGGGTKVEIK | |
| CD3_sp11a_VHVL_YY_Y | DIVMTQTPLSSPVTLGQPASISCRSSQSLVRSDGTTYFNVVYQ | 161 |
| | QRPGQPPRLLIYRVSNRFSGVPDRFSGSGAGTDFTLKISRVEA | |
| | EDVGVYYCLQSSHFPVVTFGGGTKVEIK | |
| CD3_sp11a_VHVL_YY_S | DIVMTQTPLSSPVTLGQPASISCRSSQSLVRSDGTTYFNVVYQ | 161 |
| | QRPGQPPRLLIYRVSNRFSGVPDRFSGSGAGTDFTLKISRVEA | |
| | EDVGVYYCLQSSHFPVVTFGGGTKVEIK | |
| CD3_sp11a_VHVL_SS_ | DIVMTQTPLSSPVTLGQPASISCRSSQSLVRSEGTTYFNVVYQ | 493 |
| SANSPTM | QRPGQPPRLLIYRVSNRFSGVPDRFSGSGAGTDFTLKISRVEA | |
| | EDVGVYYCLQSSHFPVVTFGGGTKVEIK | |
| CD3_sp11a_VHVL_SS_ | DIVMTQTPLSSPVTLGQPASISCRSSQSLVRSEGTTYFNVVYQ | 493 |
| SANSPTM_Y | QRPGQPPRLLIYRVSNRFSGVPDRFSGSGAGTDFTLKISRVEA | |
| | EDVGVYYCLQSSHFPVVTFGGGTKVEIK | |
| CD3_sp11a_VHVL_SS_ | DIVMTQTPLSSPVTLGQPASISCRSSQSLVRSEGTTYFNVVYQ | 493 |
| SANSPTM_S | QRPGQPPRLLIYRVSNRFSGVPDRFSGSGAGTDFTLKISRVEA | |
| | EDVGVYYCLQSSHFPVVTFGGGTKVEIK | |
| CD3_sp11a_VHVL_SS_Y | DIVMTQTPLSSPVTLGQPASISCRSSQSLVRSDGTTYFNVVYQ | 161 |
| | QRPGQPPRLLIYRVSNRFSGVPDRFSGSGAGTDFTLKISRVEA | |
| | EDVGVYYCLQSSHFPVVTFGGGTKVEIK | |
| CD3_sp11a_VHVL_SS_S | DIVMTQTPLSSPVTLGQPASISCRSSQSLVRSDGTTYFNVVYQ | 161 |
| | QRPGQPPRLLIYRVSNRFSGVPDRFSGSGAGTDFTLKISRVEA | |
| | EDVGVYYCLQSSHFPVVTFGGGTKVEIK | |
| CD3_sp11a_VHVL_SS_ | DIVMTQTPLSSPVTLGQPASISCRSSQSLVRSEGTTYFNVVYQ | 493 |
| SANSPTM | QRPGQPPRLLIYRVSNRFSGVPDRFSGSGAGTDFTLKISRVEA | |
| | EDVGVYYCLQSSHFPVVTFGGGTKVEIK | |
| CD3_sp11a_VHVL_WS_ | DIVMTQTPLSSPVTLGQPASISCRSSQSLVRSEGTTYFNVVYQ | 493 |
| SANSPTM_Y | QRPGQPPRLLIYRVSNRFSGVPDRFSGSGAGTDFTLKISRVEA | |
| | EDVGVYYCLQSSHFPVVTFGGGTKVEIK | |
| CD3_sp11a_VHVL_WS_ | DIVMTQTPLSSPVTLGQPASISCRSSQSLVRSEGTTYFNVVYQ | 493 |
| SANSPTM_S | QRPGQPPRLLIYRVSNRFSGVPDRFSGSGAGTDFTLKISRVEA | |
| | EDVGVYYCLQSSHFPVVTFGGGTKVEIK | |
| CD3_sp11a_VHVL_WS_Y | DIVMTQTPLSSPVTLGQPASISCRSSQSLVRSDGTTYFNVVYQ | 161 |
| | QRPGQPPRLLIYRVSNRFSGVPDRFSGSGAGTDFTLKISRVEA | |
| | EDVGVYYCLQSSHFPVVTFGGGTKVEIK | |
| CD3_sp11a_VHVL_WS_S | DIVMTQTPLSSPVTLGQPASISCRSSQSLVRSDGTTYFNVVYQ | 161 |
| | QRPGQPPRLLIYRVSNRFSGVPDRFSGSGAGTDFTLKISRVEA | |
| | EDVGVYYCLQSSHFPVVTFGGGTKVEIK | |
| CD3_sp11a_VHVL_WS_ | DIVMTQTPLSSPVTLGQPASISCRSSQSLVRSEGTTYFNVVYQ | 493 |
| SANSPTM | QRPGQPPRLLIYRVSNRFSGVPDRFSGSGAGTDFTLKISRVEA | |
| | EDVGVYYCLQSSHFPVVTFGGGTKVEIK | |
| CD3_sp11a_VHVL_SW_ | DIVMTQTPLSSPVTLGQPASISCRSSQSLVRSEGTTYFNVVYQ | 493 |
| SANSPTM_Y | QRPGQPPRLLIYRVSNRFSGVPDRFSGSGAGTDFTLKISRVEA | |
| | EDVGVYYCLQSSHFPVVTFGGGTKVEIK | |
| CD3_sp11a_VHVL_SW_ | DIVMTQTPLSSPVTLGQPASISCRSSQSLVRSEGTTYFNVVYQ | 493 |
| SANSPTM _S | QRPGQPPRLLIYRVSNRFSGVPDRFSGSGAGTDFTLKISRVEA | |
| | EDVGVYYCLQSSHFPVVTFGGGTKVEIK | |
| CD3_sp11a_VHVL_SW_Y | DIVMTQTPLSSPVTLGQPASISCRSSQSLVRSDGTTYFNVVYQ | 161 |
| | QRPGQPPRLLIYRVSNRFSGVPDRFSGSGAGTDFTLKISRVEA | |
| | EDVGVYYCLQSSHFPVVTFGGGTKVEIK | |
| CD3_sp11 a_VHVL_SW_S | DIVMTQTPLSSPVTLGQPASISCRSSQSLVRSDGTTYFNVVYQ | 161 |
| | QRPGQPPRLLIYRVSNRFSGVPDRFSGSGAGTDFTLKISRVEA | |
| | EDVGVYYCLQSSHFPVVTFGGGTKVEIK | |
| CD3_sp11a_VHVL_SW_ | DIVMTQTPLSSPVTLGQPASISCRSSQSLVRSEGTTYFNVVYQ | 493 |
| SANSPTM | QRPGQPPRLLIYRVSNRFSGVPDRFSGSGAGTDFTLKISRVEA | |
| | EDVGVYYCLQSSHFPVVTFGGGTKVEIK | |
| CD3_sp11a_VHVL_TW_ | DIVMTQTPLSSPVTLGQPASISCRSSQSLVRSEGTTYFNVVYQ | 493 |
| SANSPTM _Y | QRPGQPPRLLIYRVSNRFSGVPDRFSGSGAGTDFTLKISRVEA | |
| | EDVGVYYCLQSSHFPVVTFGGGTKVEIK | |
| CD3_sp11a_VHVL_TW_ | DIVMTQTPLSSPVTLGQPASISCRSSQSLVRSEGTTYFNVVYQ | 493 |
| SANSPTM _S | QRPGQPPRLLIYRVSNRFSGVPDRFSGSGAGTDFTLKISRVEA | |
| | EDVGVYYCLQSSHFPVVTFGGGTKVEIK | |
| CD3_sp11a_VHVL_TW_Y | DIVMTQTPLSSPVTLGQPASISCRSSQSLVRSDGTTYFNVVYQ | 161 |
| | QRPGQPPRLLIYRVSNRFSGVPDRFSGSGAGTDFTLKISRVEA | |
| | EDVGVYYCLQSSHFPVVTFGGGTKVEIK | |
| CD3_sp11a_VHVL_TW_S | DIVMTQTPLSSPVTLGQPASISCRSSQSLVRSDGTTYFNVVYQ | 161 |
| | QRPGQPPRLLIYRVSNRFSGVPDRFSGSGAGTDFTLKISRVEA | |
| | EDVGVYYCLQSSHFPVVTFGGGTKVEIK | |
| CD3_sp11a_VHVL_TW_ | DIVMTQTPLSSPVTLGQPASISCRSSQSLVRSEGTTYFNVVYQ | 493 |
| SANSPTM | QRPGQPPRLLIYRVSNRFSGVPDRFSGSGAGTDFTLKISRVEA | |
| | EDVGVYYCLQSSHFPVVTFGGGTKVEIK | |
| CD3_sp11a_VHVL_TT_ | DIVMTQTPLSSPVTLGQPASISCRSSQSLVRSEGTTYFNVVYQ | 493 |
| SANSPTM_Y | QRPGQPPRLLIYRVSNRFSGVPDRFSGSGAGTDFTLKISRVEA | |
| | EDVGVYYCLQSSHFPVVTFGGGTKVEIK | |
| CD3_sp11a_VHVL_TT_S | DIVMTQTPLSSPVTLGQPASISCRSSQSLVRSEGTTYFNVVYQ | 493 |
| ANSPTM_S | QRPGQPPRLLIYRVSNRFSGVPDRFSGSGAGTDFTLKISRVEA | |
| | EDVGVYYCLQSSHFPVVTFGGGTKVEIK | |
| CD3_sp11a_VHVL_TT_Y | DIVMTQTPLSSPVTLGQPASISCRSSQSLVRSDGTTYFNVVYQ | 161 |
| | QRPGQPPRLLIYRVSNRFSGVPDRFSGSGAGTDFTLKISRVEA | |
| | EDVGVYYCLQSSHFPVVTFGGGTKVEIK | |
| CD3_sp11a_VHVL_TT_S | DIVMTQTPLSSPVTLGQPASISCRSSQSLVRSDGTTYFNVVYQ | 161 |
| | QRPGQPPRLLIYRVSNRFSGVPDRFSGSGAGTDFTLKISRVEA | |
| | EDVGVYYCLQSSHFPVVTFGGGTKVEIK | |
| CD3_sp11 a_VHVL_TT_S | DIVMTQTPLSSPVTLGQPASISCRSSQSLVRSEGTTYFNVVYQ | 493 |
| ANSPTM | QRPGQPPRLLIYRVSNRFSGVPDRFSGSGAGTDFTLKISRVEA | |
| | EDVGVYYCLQSSHFPVVTFGGGTKVEIK | |
| CD3_SP11AVH3_VLK_3_Y | EIVLTQSPGTLSLSPGERATLSCRSSQSLVRSEGTTYFNVVYQ | 494 |
| | QKPGQAPRLLIYRVSNRFSGIPDRFSGSGSGTDFTLTISRLEPE | |
| | DLAVYYCLQSSHFPVVTFGGGTKVEIK | |
| CD3_SP11AVH3_VLK_3_S | EIVLTQSPGTLSLSPGERATLSCRSSQSLVRSEGTTYFNVVYQ | 494 |
| | QKPGQAPRLLIYRVSNRFSGIPDRFSGSGSGTDFTLTISRLEPE | |
| | DLAVYYCLQSSHFPVVTFGGGTKVEIK | |
| CD3_SP11AVH3_VLK_3_ | EIVLTQSPGTLSLSPGERATLSCRSSQSLVRSDGTTYFNVVYQ | 556 |
| Y_PTM | QKPGQAPRLLIYRVSNRFSGIPDRFSGSGSGTDFTLTISRLEPE | |
| | DLAVYYCLQSSHFPVVTFGGGTKVEIK | |
| CD3_SP11AVH3_VLK_3_ | EIVLTQSPGTLSLSPGERATLSCRSSQSLVRSDGTTYFNVVYQ | 556 |
| S_PTM | QKPGQAPRLLIYRVSNRFSGIPDRFSGSGSGTDFTLTISRLEPE | |
| | DLAVYYCLQSSHFPVVTFGGGTKVEIK | |
| CD3_SP11AVH3_VLK_3_ | EIVLTQSPGTLSLSPGERATLSCRSSQSLVRSEGTTYFNVVYQ | 494 |
| Y_SW | QKPGQAPRLLIYRVSNRFSGIPDRFSGSGSGTDFTLTISRLEPE | |
| | DLAVYYCLQSSHFPVVTFGGGTKVEIK | |
| CD3_SP11AVH3_VLK_3_ | EIVLTQSPGTLSLSPGERATLSCRSSQSLVRSEGTTYFNVVYQ | 494 |
| S_SW | QKPGQAPRLLIYRVSNRFSGIPDRFSGSGSGTDFTLTISRLEPE | |
| | DLAVYYCLQSSHFPVVTFGGGTKVEIK | |
| CD3_SP11AVH3_VLK_3_ | EIVLTQSPGTLSLSPGERATLSCRSSQSLVRSDGTTYFNVVYQ | 556 |
| Y_PTM_SW | QKPGQAPRLLIYRVSNRFSGIPDRFSGSGSGTDFTLTISRLEPE | |
| | DLAVYYCLQSSHFPVVTFGGGTKVEIK | |
| CD3_SP11AVH3_VLK_3_ | EIVLTQSPGTLSLSPGERATLSCRSSQSLVRSDGTTYFNVVYQ | 556 |
| S_SVVPTM | QKPGQAPRLLIYRVSNRFSGIPDRFSGSGSGTDFTLTISRLEPE | |
| | DLAVYYCLQSSHFPVVTFGGGTKVEIK | |
| CD3_SP11AVH3_VLK_S | EIVLTQSPGTLSLSPGERATLSCRSSQSLVRSDGTTYFNVVYQ | 556 |
| VVPTM | QKPGQAPRLLIYRVSNRFSGIPDRFSGSGSGTDFTLTISRLEPE | |
| | DLAVYYCLQSSHFPVVTFGGGTKVEIK | |
| CD3_SP11AVH3_VLK_3_ | EIVLTQSPGTLSLSPGERATLSCRSSQSLVRSEGTTYFNVVYQ | 494 |
| SW | QKPGQAPRLLIYRVSNRFSGIPDRFSGSGSGTDFTLTISRLEPE | |
| | DLAVYYCLQSSHFPVVTFGGGTKVEIK | |
| CD3_sp11a_VH1_VK2_Y | DIVMTQTPLSSPVTLGQPASISCRSSQSLVRSDGTTYFNVVYQ | 161 |
| | QRPGQPPRLLIYRVSNRFSGVPDRFSGSGAGTDFTLKISRVEA | |
| | EDVGVYYCLQSSHFPVVTFGGGTKVEIK | |
| CD3_sp11a_VH1_VK2_S | DIVMTQTPLSSPVTLGQPASISCRSSQSLVRSDGTTYFNVVYQ | 161 |
| | QRPGQPPRLLIYRVSNRFSGVPDRFSGSGAGTDFTLKISRVEA | |
| | EDVGVYYCLQSSHFPVVTFGGGTKVEIK | |
| CD3_sp11a_VH1_VK2_Y_ | DIVMTQTPLSSPVTLGQPASISCRSSQSLVRSEGTTYFNVVYQ | 493 |
| PTM | QRPGQPPRLLIYRVSNRFSGVPDRFSGSGAGTDFTLKISRVEA | |
| | EDVGVYYCLQSSHFPVVTFGGGTKVEIK | |
| CD3_sp11a_VH1_VK2_S_ | DIVMTQTPLSSPVTLGQPASISCRSSQSLVRSEGTTYFNVVYQ | 493 |
| PTM | QRPGQPPRLLIYRVSNRFSGVPDRFSGSGAGTDFTLKISRVEA | |
| | EDVGVYYCLQSSHFPVVTFGGGTKVEIK | |
| CD3_sp11a_VH1_VK2_Y_ | DIVMTQTPLSSPVTLGQPASISCRSSQSLVRSDGTTYFNVVYQ | 161 |
| SW | QRPGQPPRLLIYRVSNRFSGVPDRFSGSGAGTDFTLKISRVEA | |
| | EDVGVYYCLQSSHFPVVTFGGGTKVEIK | |
| CD3_sp11a_VH1_VK2_S_ | DIVMTQTPLSSPVTLGQPASISCRSSQSLVRSDGTTYFNVVYQ | 161 |
| SW | QRPGQPPRLLIYRVSNRFSGVPDRFSGSGAGTDFTLKISRVEA | |
| | EDVGVYYCLQSSHFPVVTFGGGTKVEIK | |
| CD3_sp11a_VH1_VK2_Y_ | DIVMTQTPLSSPVTLGQPASISCRSSQSLVRSEGTTYFNVVYQ | 493 |
| PTM | QRPGQPPRLLIYRVSNRFSGVPDRFSGSGAGTDFTLKISRVEA | |
| | EDVGVYYCLQSSHFPVVTFGGGTKVEIK | |
| CD3_sp11a_VH1_VK2_S_ | DIVMTQTPLSSPVTLGQPASISCRSSQSLVRSEGTTYFNVVYQ | 493 |
| PTM_SW | QRPGQPPRLLIYRVSNRFSGVPDRFSGSGAGTDFTLKISRVEA | |
| | EDVGVYYCLQSSHFPVVTFGGGTKVEIK | |
| CD3_sp11a_VH1_VK2_SW | DIVMTQTPLSSPVTLGQPASISCRSSQSLVRSDGTTYFNVVYQ | 161 |
| | QRPGQPPRLLIYRVSNRFSGVPDRFSGSGAGTDFTLKISRVEA | |
| | EDVGVYYCLQSSHFPVVTFGGGTKVEIK | |
| CD3_sp11a_VH1_VK2_SW | DIVMTQTPLSSPVTLGQPASISCRSSQSLVRSEGTTYFNVVYQ | 493 |
| PTM | QRPGQPPRLLIYRVSNRFSGVPDRFSGSGAGTDFTLKISRVEA | |
| | EDVGVYYCLQSSHFPVVTFGGGTKVEIK | |
| CD3_SP11A_VH3_VLK1_Y | DIQMTQSPSSLSASVGDRVTITCRSSQSLVRSEGTTYFNVVYQ | 490 |
| | QKPGKAPKLLIYRVSNRFSGVPSRFSGSGSGTDFTLTISSLQP | |
| | EDFATYYCLQSSHFPVVTFGGGTKVEIK | |
| CD3_SP11A_VH3_VLK1_S | DIQMTQSPSSLSASVGDRVTITCRSSQSLVRSEGTTYFNVVYQ | 490 |
| | QKPGKAPKLLIYRVSNRFSGVPSRFSGSGSGTDFTLTISSLQP | |
| | EDFATYYCLQSSHFPVVTFGGGTKVEIK | |
| CD3_SP11A_VH3_VLK1_ | DIQMTQSPSSLSASVGDRVTITCRSSQSLVRSDGTTYFNVVYQ | 555 |
| Y_PTM | QKPGKAPKLLIYRVSNRFSGVPSRFSGSGSGTDFTLTISSLQP | |
| | EDFATYYCLQSSHFPVVTFGGGTKVEIK | |
| CD3 SP11A_VH3_VLK1_ | DIQMTQSPSSLSASVGDRVTITCRSSQSLVRSDGTTYFNVVYQ | 555 |
| S_PTM | QKPGKAPKLLIYRVSNRFSGVPSRFSGSGSGTDFTLTISSLQP | |
| | EDFATYYCLQSSHFPVVTFGGGTKVEIK | |
| CD3_SP11A_VH3_VLK1_ | DIQMTQSPSSLSASVGDRVTITCRSSQSLVRSEGTTYFNVVYQ | 490 |
| Y_SW | QKPGKAPKLLIYRVSNRFSGVPSRFSGSGSGTDFTLTISSLQP | |
| | EDFATYYCLQSSHFPVVTFGGGTKVEIK | |
| CD3_SP11A_VH3_VLK1_ | DIQMTQSPSSLSASVGDRVTITCRSSQSLVRSEGTTYFNVVYQ | 490 |
| S_SW | QKPGKAPKLLIYRVSNRFSGVPSRFSGSGSGTDFTLTISSLQP | |
| | EDFATYYCLQSSHFPVVTFGGGTKVEIK | |
| CD3_SP11A_VH3_VLK1_ | DIQMTQSPSSLSASVGDRVTITCRSSQSLVRSDGTTYFNVVYQ | 555 |
| Y_PTM | QKPGKAPKLLIYRVSNRFSGVPSRFSGSGSGTDFTLTISSLQP | |
| | EDFATYYCLQSSHFPVVTFGGGTKVEIK | |
| CD3_SP11A_VH3_VLK1 | DIQMTQSPSSLSASVGDRVTITCRSSQSLVRSDGTTYFNVVYQ | 555 |
| S_PTM_SW | QKPGKAPKLLIYRVSNRFSGVPSRFSGSGSGTDFTLTISSLQP | |
| | EDFATYYCLQSSHFPVVTFGGGTKVEIK | |
| CD3_SP11A_VH3_VLK1_ | DIQMTQSPSSLSASVGDRVTITCRSSQSLVRSDGTTYFNVVYQ | 555 |
| PTM_SW | QKPGKAPKLLIYRVSNRFSGVPSRFSGSGSGTDFTLTISSLQP | |
| | EDFATYYCLQSSHFPVVTFGGGTKVEIK | |
| CD3 SP11A_VH3_VLK1_ | DIQMTQSPSSLSASVGDRVTITCRSSQSLVRSEGTTYFNVVYQ | 490 |
| SW | QKPGKAPKLLIYRVSNRFSGVPSRFSGSGSGTDFTLTISSLQP | |
| | EDFATYYCLQSSHFPVVTFGGGTKVEIK | |
| CD3_SP11A_VH5_VK2_Y | DIVMTQTPLSSPVTLGQPASISCRSSQSLVRSDGTTYFNVVYQ | 161 |
| | QRPGQPPRLLIYRVSNRFSGVPDRFSGSGAGTDFTLKISRVEA | |
| | EDVGVYYCLQSSHFPVVTFGGGTKVEIK | |
| CD3_SP11A_VH5_VK2_S | DIVMTQTPLSSPVTLGQPASISCRSSQSLVRSDGTTYFNVVYQ | 161 |
| | QRPGQPPRLLIYRVSNRFSGVPDRFSGSGAGTDFTLKISRVEA | |
| | EDVGVYYCLQSSHFPVVTFGGGTKVEIK | |
| CD3_SP11A_VH5_VK2_ | DIVMTQTPLSSPVTLGQPASISCRSSQSLVRSDGTTYFNVVYQ | 161 |
| Y_PTM | QRPGQPPRLLIYRVSNRFSGVPDRFSGSGAGTDFTLKISRVEA | |
| | EDVGVYYCLQSSHFPVVTFGGGTKVEIK | |
| CD3_SP11A_VH5_VK2_ | DIVMTQTPLSSPVTLGQPASISCRSSQSLVRSDGTTYFNVVYQ | 161 |
| S_PTM | QRPGQPPRLLIYRVSNRFSGVPDRFSGSGAGTDFTLKISRVEA | |
| | EDVGVYYCLQSSHFPVVTFGGGTKVEIK | |
| CD3_SP11A_VH5_VK2_ | DIVMTQTPLSSPVTLGQPASISCRSSQSLVRSDGTTYFNVVYQ | 161 |
| Y_SW | QRPGQPPRLLIYRVSNRFSGVPDRFSGSGAGTDFTLKISRVEA | |
| | EDVGVYYCLQSSHFPVVTFGGGTKVEIK | |
| CD3_SP11A_VH5_VK2_ | DIVMTQTPLSSPVTLGQPASISCRSSQSLVRSDGTTYFNVVYQ | 161 |
| S_SW | QRPGQPPRLLIYRVSNRFSGVPDRFSGSGAGTDFTLKISRVEA | |
| | EDVGVYYCLQSSHFPVVTFGGGTKVEIK | |
| CD3_SP11A_VH5_VK2_ | DIVMTQTPLSSPVTLGQPASISCRSSQSLVRSDGTTYFNVVYQ | 161 |
| Y_PTM_SW | QRPGQPPRLLIYRVSNRFSGVPDRFSGSGAGTDFTLKISRVEA | |
| | EDVGVYYCLQSSHFPVVTFGGGTKVEIK | |
| CD3_SP11A_VH5_VK2_ | DIVMTQTPLSSPVTLGQPASISCRSSQSLVRSDGTTYFNVVYQ | 161 |
| S_PTM_SW | QRPGQPPRLLIYRVSNRFSGVPDRFSGSGAGTDFTLKISRVEA | |
| | EDVGVYYCLQSSHFPVVTFGGGTKVEIK | |
| CD3_SP11A_VH5_VK2_ | DIVMTQTPLSSPVTLGQPASISCRSSQSLVRSDGTTYFNVVYQ | 161 |
| PTM_SW | QRPGQPPRLLIYRVSNRFSGVPDRFSGSGAGTDFTLKISRVEA | |
| | EDVGVYYCLQSSHFPVVTFGGGTKVEIK | |
| CD3_SP11A_VH5_VK2_SW | DIVMTQTPLSSPVTLGQPASISCRSSQSLVRSDGTTYFNVVYQ | 161 |
| | QRPGQPPRLLIYRVSNRFSGVPDRFSGSGAGTDFTLKISRVEA | |
| | EDVGVYYCLQSSHFPVVTFGGGTKVEIK | |

[0124] Tables 1A to 10 list CDR consensus sequences based on the CDR sequences of the exemplary CD3 binding molecules described herein. The group C1 CDR sequences in Table 1A are based upon the Kabat CDR sequences, Chothia CDR sequences, IMGT CDR sequences, and combinations thereof, of the exemplary CD3 binding molecules NOV292, NOV589, NOV567, and the exemplary CD3 binding molecules which include “sp11a” in the binder name. The group C2 CDR sequences in Table 1B are based upon the Kabat CDR sequences, Chothia CDR sequences, IMGT CDR sequences, and combinations thereof, of the exemplary CD3 binding molecules NOV453, NOV229, NOV580, NOV221, and the exemplary CD3 binding molecules which include “sp9a” in the binder name. The group C3 CDR sequences in Table 10 are based upon the Kabat CDR sequences, Chothia CDR sequences, IMGT CDR sequences, and combinations thereof, of the exemplary CD3 binding molecules NOV123, sp10b, NOV110, and NOV832.

[0125] The specific CDR sequences of the exemplary CD3 binding molecules described in the Examples are listed in Tables 1B-1 to 1H-2. Exemplary VH and VL sequences are listed in Tables 1J-1 and 1J-2, respectively.

[0126] In some embodiments, the CD3 binding molecules comprise a heavy chain CDR having an amino acid sequence of any one of the CDR consensus sequences listed in Table 1A, Table 1B, or Table 10. In particular embodiments, the present disclosure provides CD3 binding molecules, comprising (or alternatively, consisting of) one, two, three, or more heavy chain CDRs selected from the heavy chain CDRs described in Table 1A, Table 1B, or Table 10.

[0127] In some embodiments, the CD3 binding molecules comprise a light chain CDR having an amino acid sequence of any one of the CDR consensus sequences listed in Table 1A, Table 1B, or Table 10. In particular embodiments, the present disclosure provides CD3 binding molecules, comprising (or alternatively, consisting of) one, two, three, or more light chain CDRs selected from the light chain CDRs described in Table 1A, Table 1B, or Table 10.

[0128] In some embodiments, a CD3 binding molecule comprises a CDR-H1 sequence, a CDR-H2 sequence a CDR-H3 sequence, a CDR-L1 sequence, a CDR-L2 sequence, and a CDR-L3 sequence set forth in Table 1A.

[0129] In some embodiments, the amino acid designated X₁ in Table 1A is T. In some embodiments, the amino acid designated X₁ in Table 1A is A. In some embodiments, the amino acid designated X₂ in Table 1A is S. In some embodiments, the amino acid designated X₂ in Table 1A is R. In some embodiments, the amino acid designated X₃ in Table 1A is N. In some embodiments, the amino acid designated X₃ in Table 1A is Y. In some embodiments, the amino acid designated X₃ in Table 1A is Q. In some embodiments, the amino acid designated X₄ in Table 1A is H. In some embodiments, the amino acid designated X₄ in Table 1A is S. In some embodiments, the amino acid designated X₅ in Table 1A is M. In some embodiments, the amino acid designated X₅ in Table 1A is L. In some embodiments, the amino acid designated X₆ in Table 1A is K. In some embodiments, the amino acid designated X₆ in Table 1A is R. In some embodiments, the amino acid designated X₇ in Table 1A is S. In some embodiments, the amino acid designated X₇ in Table 1A is K. In some embodiments, the amino acid designated X₅₅ in Table 1A is F. In some embodiments, the amino acid designated X₅₅ in Table 1A is Y. In some embodiments, the amino acid designated X₅₅ in Table 1A is S. In some embodiments, the amino acid designated X₈ in Table 1A is W. In some embodiments, the amino acid designated X₈ in Table 1A is Y. In some embodiments, the amino acid designated X₈ in Table 1A is S. In some embodiments, the amino acid designated X₈ in Table 1A is T. In some embodiments, the amino acid designated X₉ in Table 1A is W. In some embodiments, the amino acid designated X₉ in Table 1A is Y. In some embodiments, the amino acid designated X₉ in Table 1A is S. In some embodiments, the amino acid designated X₉ in Table 1A is T. In some embodiments, the amino acid designated X₁₀ in Table 1A is H. In some embodiments, the amino acid designated X₁₀ in Table 1A is Y. In some embodiments, the amino acid designated X₁₁ in Table 1A is S. In some embodiments, the amino acid designated X₁₁ in Table 1A is G. In some embodiments, the amino acid designated X₁₂ in Table 1A is I. In some embodiments, the amino acid designated X₁₂ in Table 1A is L. In some embodiments, the amino acid designated X₁₃ in Table 1A is V. In some embodiments, the amino acid designated X₁₃ in Table 1A is G. In some embodiments, the amino acid designated X₁₄ in Table 1A is R. In some embodiments, the amino acid designated X₁₄ in Table 1A is N. In some embodiments, the amino acid designated X₁₅ in Table 1A is D. In some embodiments, the amino acid designated X₁₅ in Table 1A is E. In some embodiments, the amino acid designated X₁₅ in Table 1A is L. In some embodiments, the amino acid designated X₁₆ in Table 1A is G. In some embodiments, the amino acid designated X₁₆ in Table 1A is N. In some embodiments, the amino acid designated X₁₆ in Table 1A is E. In some embodiments, the amino acid designated X₁₇ in Table 1A is R. In some embodiments, the amino acid designated X₁₇ in Table 1A is S. In some embodiments, the amino acid designated X₁₈ in Table 1A is V. In some embodiments, the amino acid designated X₁₈ in Table 1A is T. In some embodiments, the amino acid designated X₁₉ in Table 1A is N. In some embodiments, the amino acid designated X₁₉ in Table 1A is T. In some embodiments, the amino acid designated X₂₀ in Table 1A is R. In some embodiments, the amino acid designated X₂₀ in Table 1A is L. In some embodiments, the amino acid designated X₂₁ in Table 1A is F. In some embodiments, the amino acid designated X₂₁ in Table 1A is E. In some embodiments, the amino acid designated X₂₂ in Table 1A is S. In some embodiments, the amino acid designated X₂₂ in Table 1A is Y. In some embodiments, the amino acid designated X₂₃ in Table 1A is S. In some embodiments, the amino acid designated X₂₃ in Table 1A is Y. In some embodiments, the amino acid designated X₂₄ in Table 1A is S. In some embodiments, the amino acid designated X₂₄ in Table 1A is A. In some embodiments, the amino acid designated X₂₅ in Table 1A is H. In some embodiments, the amino acid designated X₂₅ in Table 1A is T. In some embodiments, the amino acid designated X₂₆ in Table 1A is F. In some embodiments, the amino acid designated X₂₆ in Table 1A is Y. In some embodiments, the amino acid designated X₂₇ in Table 1A is W. In some embodiments, the amino acid designated X₂₇ in Table 1A is Y.

[0130] In some embodiments, a CD3 binding molecule comprises the CDR-H1 sequence C1-1. In some embodiments, a CD3 binding molecule comprises the CDR-H1 sequence C1-2. In some embodiments, a CD3 binding molecule comprises the CDR-H1 sequence C1-3. In some embodiments, a CD3 binding molecule comprises the CDR-H1 sequence C1-4.

[0131] In some embodiments, a CD3 binding molecule comprises the CDR-H2 sequence C1-5. In some embodiments, a CD3 binding molecule comprises the CDR-H2 sequence C1-6. In some embodiments, a CD3 binding molecule comprises the CDR-H2 sequence C1-7.

[0132] In some embodiments, a CD3 binding molecule comprises the CDR-H3 sequence C1-8. In some embodiments, a CD3 binding molecule comprises the CDR-H3 sequence C1-9. In some embodiments, a CD3 binding molecule comprises the CDR-H3 sequence C1-10. In some embodiments, a CD3 binding molecule comprises the CDR-H3 sequence C1-11.

[0133] In some embodiments, a CD3 binding molecule comprises the CDR-L1 sequence C1-12. In some embodiments, a CD3 binding molecule comprises the CDR-L1 sequence C1-13. In some embodiments, a CD3 binding molecule comprises the CDR-L1 sequence C1-14. In some embodiments, a CD3 binding molecule comprises the CDR-L1 sequence C1-15. In some embodiments, a CD3 binding molecule comprises the CDR-L1 sequence C1-16. In some embodiments, a CD3 binding molecule comprises the CDR-L1 sequence C1-17.

[0134] In some embodiments, a CD3 binding molecule comprises the CDR-L2 sequence C1-18. In some embodiments, a CD3 binding molecule comprises the CDR-L2 sequence C1-19.

[0135] In some embodiments, a CD3 binding molecule comprises the CDR-L3 sequence C1-20. In some embodiments, a CD3 binding molecule comprises the CDR-L3 sequence C1-21. In some embodiments, a CD3 binding molecule comprises the CDR-L3 sequence C1-22. In some embodiments, a CD3 binding molecule comprises the CDR-L3 sequence C1-23.

[0136] In some embodiments, a CD3 binding molecule comprises a CDR-H1 sequence, a CDR-H2 sequence a CDR-H3 sequence, a CDR-L1 sequence, a CDR-L2 sequence, and a CDR-L3 sequence set forth in Table 1B.

[0137] In some embodiments, the amino acid designated X₂₈ in Table 1B is V. In some embodiments, the amino acid designated X₂₈ in Table 1B is I. In some embodiments, the amino acid designated X₂₉ in Table 1B is F. In some embodiments, the amino acid designated X₂₉ in Table 1B is Y. In some embodiments, the amino acid designated X₃₀ in Table 1B is N. In some embodiments, the amino acid designated X₃₀ in Table 1B is S. In some embodiments, the amino acid designated X₃₁ in Table 1B is A. In some embodiments, the amino acid designated X₃₁ in Table 1B is S. In some embodiments, the amino acid designated X₃₂ in Table 1B is T. In some embodiments, the amino acid designated X₃₂ in Table 1B is K. In some embodiments, the amino acid designated X₃₃ in Table 1B is T. In some embodiments, the amino acid designated X₃₃ in Table 1B is A. In some embodiments, the amino acid designated X₃₄ in Table 1B is S. In some embodiments, the amino acid designated X₃₄ in Table 1B is R. In some embodiments, the amino acid designated X₃₅ in Table 1B is N. In some embodiments, the amino acid designated X₃₅ in Table 1B is G. In some embodiments, the amino acid designated X₃₆ in Table 1B is S. In some embodiments, n the amino acid designated X₃₆ in Table 1B is A. In some embodiments, the amino acid designated X₃₇ in Table 1B is A. In some embodiments, the amino acid designated X₃₇ in Table 1B is T. In some embodiments, the amino acid designated X₃₇ in Table 1B is S. In some embodiments, the amino acid designated X₃₈ in Table 1B is N. In some embodiments, the amino acid designated X₃₈ in Table 1B is D. In some embodiments, the amino acid designated X₃₉ in Table 1B is N. In some embodiments, the amino acid designated X₃₉ in Table 1B is K. In some embodiments, the amino acid designated X₄₀ in Table 1B is D. In some embodiments, the amino acid designated X₄₀ in Table 1B is N. In some embodiments, the amino acid designated X₄₁ in Table 1B is H. In some embodiments, the amino acid designated X₄₁ in Table 1B is N. In some embodiments, the amino acid designated X₄₂ in Table 1B is Q. In some embodiments, the amino acid designated X₄₂ in Table 1B is E. In some embodiments, the amino acid designated X₄₃ in Table 1B is R. In some embodiments, the amino acid designated X₄₃ in Table 1B is S. In some embodiments, the amino acid designated X₄₃ in Table 1B is G. In some embodiments, a CD3 binding molecule comprises the CDR-H1 sequence C2-1. In some embodiments, a CD3 binding molecule comprises the CDR-H1 sequence C2-2.

[0138] In some embodiments, a CD3 binding molecule comprises the CDR-H1 sequence C2-3. In some embodiments, a CD3 binding molecule comprises the CDR-H1 sequence C2-4.

[0139] In some embodiments, a CD3 binding molecule comprises the CDR-H2 sequence C2-5. In some embodiments, a CD3 binding molecule comprises the CDR-H2 sequence C2-6. In some embodiments, a CD3 binding molecule comprises the CDR-H2 sequence C2-7.

[0140] In some embodiments, a CD3 binding molecule comprises the CDR-H3 sequence C2-8. In some embodiments, a CD3 binding molecule comprises the CDR-H3 sequence C2-9.

[0141] In some embodiments, a CD3 binding molecule comprises the CDR-L1 sequence C2-10. In some embodiments, a CD3 binding molecule comprises the CDR-L1 sequence C2-11. In some embodiments, a CD3 binding molecule comprises the CDR-L1 sequence C2-12.

[0142] In some embodiments, a CD3 binding molecule comprises the CDR-L2 sequence C2-13. In some embodiments, a CD3 binding molecule comprises the CDR-L2 sequence C2-14. In some embodiments, a CD3 binding molecule comprises the CDR-L2 sequence C2-15.

[0143] In some embodiments, a CD3 binding molecule comprises the CDR-L3 sequence C2-16. In some embodiments, a CD3 binding molecule comprises the CDR-L3 sequence C2-17.

[0144] In some embodiments, a CD3 binding molecule comprises a CDR-H1 sequence, a CDR-H2 sequence a CDR-H3 sequence, a CDR-L1 sequence, a CDR-L2 sequence, and a CDR-L3 sequence set forth in Table 10.

[0145] In some embodiments, the amino acid designated X₄₄ in Table 10 is G. In some embodiments, the amino acid designated X₄₄ in Table 10 is A. In some embodiments, the amino acid designated X₄₅ in Table 10 is H. In some embodiments, the amino acid designated X₄₅ in Table 10 is N. In some embodiments, the amino acid designated X₄₆ in Table 10 is D. In some embodiments, the amino acid designated X₄₆ in Table 10 is G. In some embodiments, the amino acid designated X₄₇ in Table 10 is A. In some embodiments, the amino acid designated X₄₇ in Table 10 is G. In some embodiments, the amino acid designated X₄₈ in Table 10 is N. In some embodiments, the amino acid designated X₄₈ in Table 10 is K. In some embodiments, the amino acid designated X₄₉ in Table 10 is V. In some embodiments, the amino acid designated X₄₉ in Table 10 is A. In some embodiments, the amino acid designated X₅₀ in Table 10 is N. In some embodiments, the amino acid designated X₅₀ in Table 10 is V. In some embodiments, the amino acid designated X₅₁ in Table 10 is A. In some embodiments, the amino acid designated X₅₁ in Table 10 is V. In some embodiments, the amino acid designated X₅₂ in Table 10 is Y. In some embodiments, the amino acid designated X₅₂ in Table 10 is F. In some embodiments, the amino acid designated X₅₃ in Table 10 is I. In some embodiments, the amino acid designated X₅₃ in Table 10 is V. In some embodiments, the amino acid designated X₅₄ in Table 10 is I. In some embodiments, the amino acid designated X₅₄ in Table 10 is H.

[0146] In some embodiments, a CD3 binding molecule comprises the CDR-H1 sequence C3-1. In some embodiments, a CD3 binding molecule comprises the CDR-H1 sequence C3-2. In some embodiments, a CD3 binding molecule comprises the CDR-H1 sequence C3-3. In some embodiments, a CD3 binding molecule comprises the CDR-H1 sequence C3-4.

[0147] In some embodiments, a CD3 binding molecule comprises the CDR-H2 sequence C3-5. In some embodiments, a CD3 binding molecule comprises the CDR-H2 sequence C3-6. In some embodiments, a CD3 binding molecule comprises the CDR-H2 sequence C3-7.

[0148] In some embodiments, a CD3 binding molecule comprises the CDR-H3 sequence C3-8. In some embodiments, a CD3 binding molecule comprises the CDR-H3 sequence C3-9.

[0149] In some embodiments, a CD3 binding molecule comprises the CDR-L1 sequence C3-10. In some embodiments, a CD3 binding molecule comprises the CDR-L1 sequence C3-11. In some embodiments, a CD3 binding molecule comprises the CDR-L1 sequence C3-12.

[0150] In some embodiments, a CD3 binding molecule comprises the CDR-L2 sequence C3-13. In some embodiments, a CD3 binding molecule comprises the CDR-L2 sequence C3-14.

[0151] In some embodiments, a CD3 binding molecule comprises the CDR-L3 sequence C3-15. In some embodiments, a CD3 binding molecule comprises the CDR-L3 sequence C3-16.

[0152] In some embodiments, a CD3 binding molecule comprises CDR-H1, CDR-H2, and CDR-H3 sequences set forth in Table 1D-1 and the corresponding CDR-L1, CDR-L2, and CDR-L3 sequences set forth in Table 1D-2.

[0153] In some embodiments, a CD3 binding molecule comprises CDR-H1, CDR-H2, and CDR-H3 sequences set forth in Table 1E-1 and the corresponding CDR-L1, CDR-L2, and CDR-L3 sequences set forth in Table 1E-2.

[0154] In some embodiments, a CD3 binding molecule comprises CDR-H1, CDR-H2, and CDR-H3 sequences set forth in Table 1F-1 and the corresponding CDR-L1, CDR-L2, and CDR-L3 sequences set forth in Table 1F-2.

[0155] In some embodiments, a CD3 binding molecule comprises CDR-H1, CDR-H2, and CDR-H3 sequences set forth in Table 1G-1 and the corresponding CDR-L1, CDR-L2, and CDR-L3 sequences set forth in Table 1G-2.

[0156] In some embodiments, a CD3 binding molecule comprises CDR-H1, CDR-H2, and CDR-H3 sequences set forth in Table 1H-1 and the corresponding CDR-L1, CDR-L2, and CDR-L3 sequences set forth in Table 1H-2.

[0157] In some embodiments, a CD3 binding molecule comprises CDR-H1, CDR-H2, and CDR-H3 sequences set forth in Table 1I-1 and the corresponding CDR-L1, CDR-L2, and CDR-L3 sequences set forth in Table 1I-2.

[0158] In some embodiments, a CD3 binding molecule comprises a heavy chain CDR having an amino acid sequence of any one of the CDRs listed in Table 1B-1, Table 1C-1, Table 1D-1, Table 1E-1, Table 1F-1, Table 1G-1, Table 1H-1, or Table 1I-1. In particular embodiments, the present disclosure provides CD3 binding molecules, comprising (or alternatively, consisting of) one, two, three, or more heavy chain CDRs selected the heavy chain CDRs described in Table 1B-1, Table 1C-1, Table 1D-1, Table 1E-1, Table 1F-1, Table 1G-1, Table 1H-1, and Table 1I-1.

[0159] In some embodiments, a CD3 binding molecule comprises a light chain CDR having an amino acid sequence of any one of the CDRs listed in Table 1B-2, Table 1C-2, Table 1D-2, Table 1E-2, Table 1F-2, Table 1G-2, Table 1H-2, or Table 1I-2. In particular embodiments, the present disclosure provides CD3 binding molecules, comprising (or alternatively, consisting of) one, two, three, or more light chain CDRs selected the light chain CDRs described in Table 1B-2, Table 1C-2, Table 1D-2, Table 1E-2, Table 1F-2, Table 1G-2, Table 1H-2, and Table 1I-2.

[0160] Other CD3 binding molecules include amino acids that have been mutated, yet have at least 80, 85, 90, 95, 96, 97, 98, or 99 percent identity in the CDR regions with the CDR sequences described in Table 1. In some embodiments, such CD3 binding molecules include mutant amino acid sequences where no more than 1, 2, 3, 4 or 5 amino acids have been mutated in the CDR regions when compared with the CDR sequences described in Table 1.

[0161] In some embodiments, a CD3 binding molecule comprises a VH and/or VL domain having an amino acid sequence of any VH and/or VL domain described in Table 1. Other CD3 binding molecules include VH and/or VL domains comprising amino acid sequences having at least 80, 85, 90, 95, 96, 97, 98, or 99 percent identity to the VH and/or VL sequences described in Table 1. In some embodiments, CD3 binding molecules include VH and/or VL domains where no more than 1, 2, 3, 4 or 5 amino acids have been mutated when compared with the VH and/or VL domains depicted in the sequences described in Table 1, while retaining substantially the same therapeutic activity.

[0162] VH and VL sequences (amino acid sequences and the nucleotide sequences encoding the amino acid sequences) can be “mixed and matched” to create other CD3 binding molecules. Such “mixed and matched” CD3 binding molecules can be tested using binding assays known in the art (e.g., FACS assays described in the Examples). When chains are mixed and matched, a VH sequence from a particular VH/VL pairing should be replaced with a structurally similar VH sequence. A VL sequence from a particular VH/VL pairing should be replaced with a structurally similar VL sequence.

[0163] Accordingly, in one embodiment, the present disclosure provides CD3 binding molecules having: a heavy chain variable region (VH) comprising an amino acid sequence selected from any one of the VH sequences described in Table 1-J1; and a light chain variable region (VL) comprising an amino acid sequence described in Table 1-J2.

[0164] The CD3 binding molecules can be fused or chemically conjugated (including both covalent and non-covalent conjugations) to a heterologous protein or polypeptide (or fragment thereof, for example to a polypeptide of at least 10, at least 20, at least 30, at least 40, at least 50, at least 60, at least 70, at least 80, at least 90 or at least 100 amino acids). For example, a CD3 binding molecule can be fused directly or indirectly to a detectable protein, e.g., an enzyme or a fluorescent protein. Methods for fusing or conjugating proteins, polypeptides, or peptides to an antibody or an antibody fragment are known and can be used to fuse or conjugate a protein or polypeptide to a CD3 binding molecule of the disclosure. See, e.g., U.S. Pat. Nos. 5,336,603, 5,622,929, 5,359,046, 5,349,053, 5,447,851, and 5,112,946; European Patent Nos. EP 307,434 and EP 367,166; International Publication Nos. WO 96/04388 and WO 91/06570; Ashkenazi et al., 1991, Proc. Natl. Acad. Sci. USA 88:10535-10539; Zheng et al., 1995, J. Immunol. 154:5590-5600; and Vil et al., 1992, Proc. Natl. Acad. Sci. USA 89:11337-11341.

[0165] Additional CD3 binding molecules can be generated through the techniques of gene-shuffling, motif-shuffling, exon-shuffling, and/or codon-shuffling (collectively referred to as “DNA shuffling”). DNA shuffling can be employed to alter the activities of molecules of the disclosure or fragments thereof (e.g., molecules or fragments thereof with higher affinities and lower dissociation rates). See, generally, U.S. Pat. Nos. 5,605,793, 5,811,238, 5,830,721, 5,834,252, and 5,837,458; Patten et al., 1997, Curr. Opinion Biotechnol. 8:724-33; Harayama, 1998, Trends Biotechnol. 16(2):76-82; Hansson et al., 1999, J. Mol. Biol. 287:265-76; and Lorenzo and Blasco, 1998, Biotechniques 24(2):308-313. The CD3 binding molecules described herein or fragments thereof can be altered by being subjected to random mutagenesis by error-prone PCR, random nucleotide insertion or other methods prior to recombination. A polynucleotide encoding a fragment of a CD3 binding molecule described herein can be recombined with one or more components, motifs, sections, parts, domains, fragments, etc. of one or more heterologous molecules.

[0166] Moreover, CD3 binding molecules can be fused to marker sequences, such as a peptide to facilitate purification. In some embodiments, the marker amino acid sequence is a hexa-histidine peptide, such as the tag provided in a pQE vector (QIAGEN, Inc., 9259 Eton Avenue, Chatsworth, Calif., 91311), among others, many of which are commercially available. As described in Gentz et al., 1989, Proc. Natl. Acad. Sci. USA 86:821-824, for instance, hexa-histidine provides for convenient purification of the fusion protein. Other peptide tags useful for purification include, but are not limited to, the hemagglutinin (“HA”) tag, which corresponds to an epitope derived from the influenza hemagglutinin protein (Wilson et al., 1984 Cell 37:767), and the “flag” tag.

### 7.3. Antigen Binding Modules

[0167] Typically, one or more ABMs of the MBMs comprise immunoglobulin-based antigen-binding domains, for example the sequences of antibody fragments or derivatives. These antibody fragments and derivatives typically include the CDRs of an antibody and can include larger fragments and derivatives thereof, e.g., Fabs, scFabs, Fvs, and scFvs.

[0168] Immunoglobulin-based ABMs can comprise modifications to framework residues within a VH and/or a VL, e.g. to improve the properties of a MBM containing the ABM. For example, framework modifications can be made to decrease immunogenicity of a MBM. One approach for making such framework modifications is to “back-mutate” one or more framework residues of the ABM to a corresponding germline sequence. Such residues can be identified by comparing framework sequences to germline sequences from which the ABM is derived. To “match” framework region sequences to desired germline configuration, residues can be “back-mutated”to a corresponding germline sequence by, for example, site-directed mutagenesis. MBMs having such “back-mutated” ABMs are intended to be encompassed by the disclosure.

[0169] Another type of framework modification involves mutating one or more residues within a framework region, or even within one or more CDR regions, to remove T-cell epitopes to thereby reduce potential immunogenicity of a MBM. This approach is also referred to as “deimmunization” and is described in further detail in U.S. Patent Publication 20030153043 by Carr et al.

[0170] ABMs can also be modified to have altered glycosylation, which can be useful, for example, to increase the affinity of a MBM for one or more of its antigens. Such carbohydrate modifications can be accomplished by, for example, altering one or more sites of glycosylation within an ABM sequence. For example, one or more amino acid substitutions can be made that result in elimination of one or more variable region framework glycosylation sites to thereby eliminate glycosylation at that site. Such aglycosylation can increase the affinity of the MBM for an antigen. Such an approach is described in, e.g., U.S. Pat. Nos. 5,714,350 and 6,350,861 by Co et al.

### 7.3.1. Immunoglobulin Based Modules

[0171] 7.3.1.1. Fabs

[0172] In certain aspects, an ABM is a Fab domain. Fab domains can be produced by proteolytic cleavage of immunoglobulin molecules, using enzymes such as papain, or through recombinant expression. Fab domains typically comprise a CH1 domain attached to a VH domain which pairs with a CL domain attached to a VL domain.

[0173] In a wild-type immunoglobulin, the VH domain is paired with the VL domain to constitute the Fv region, and the CH1 domain is paired with the CL domain to further stabilize the binding module. A disulfide bond between the two constant domains can further stabilize the Fab domain.

[0174] For the MBMs, it is advantageous to use Fab heterodimerization strategies to permit the correct association of Fab domains belonging to the same ABM and minimize aberrant pairing of Fab domains belonging to different ABMs. For example, the Fab heterodimerization strategies shown in Table 2 below can be used:

TABLE 2
Fab Heterodimerization Strategies

| Name | STRATEGY | VH | CH1 | VL | CL | REFERENCE |
|---|---|---|---|---|---|---|
| F1 | CrossMabCH1- | WT | CL domain | WT | CH1 domain | Schaefer et al., |
| | CL | | | | | 2011, Cancer Cell |
| | | | | | | 2011; 20: 472-86; |
| | | | | | | PMID: 22014573. |
| F2 | orthogonal Fab | 39K, | H172A, F174G | 1R, | L135Y, S176W | Lewis et al., 2014, |
| | VHVRD1CH1CRD2 - | 62E | | 38D, | | Nat Biotechnol |
| | VLVRD1CλCRD2 | | | (36F) | | 32: 191-8 |
| F3 | orthogonal Fab | 39Y | WT | 38R | WT | Lewis et al., 2014, |
| | VHVRD2CH1wt - | | | | | Nat Biotechnol |
| | VLVRD2Cλwt | | | | | 32: 191-8 |
| F4 | TCR CαCβ | 39K | TCR Cα | 38D | TCR Cβ | Wu et al., 2015, |
| | | | | | | MAbs 7: 364-76 |
| F5 | CR3 | WT | T192E | WT | N137K, S114A | Golay at al., 2016, J |
| | | | | | | Immunol 196: 3199-211. |
| F6 | MUT4 | WT | L143Q, S188V | WT | V133T, S176V | Golay at al., 2016, J |
| | | | | | | Immunol 196: 3199-211. |
| F7 | DuetMab | WT | F126C | WT | S121C | Mazor et al., 2015, |
| | | | | | | MAbs 7: 377-89; |
| | | | | | | Mazor et al., 2015, |
| | | | | | | MAbs 7: 461-669. |

[0175] Accordingly, in certain embodiments, correct association between the two polypeptides of a Fab is promoted by exchanging the VL and VH domains of the Fab for each other or exchanging the CH1 and CL domains for each other, e.g., as described in WO 2009/080251.

[0176] Correct Fab pairing can also be promoted by introducing one or more amino acid modifications in the CH1 domain and one or more amino acid modifications in the CL domain of the Fab and/or one or more amino acid modifications in the VH domain and one or more amino acid modifications in the VL domain. The amino acids that are modified are typically part of the VH:VL and CH1:CL interface such that the Fab components preferentially pair with each other rather than with components of other Fabs.

[0177] In one embodiment, the one or amino acid modifications are limited to the conserved framework residues of the variable (VH, VL) and constant (CH1, CL) domains as indicated by the Kabat numbering of residues. Almagro, 2008, Frontiers In Bioscience 13:1619-1633 provides a definition of the framework residues on the basis of Kabat, Chothia, and IMGT numbering schemes.

[0178] In one embodiment, the modifications introduced in the VH and CH1 and/or VL and CL domains are complementary to each other. Complementarity at the heavy and light chain interface can be achieved on the basis of steric and hydrophobic contacts, electrostatic/charge interactions or a combination of the variety of interactions. The complementarity between protein surfaces is broadly described in the literature in terms of lock and key fit, knob into hole, protrusion and cavity, donor and acceptor etc., all implying the nature of structural and chemical match between the two interacting surfaces.

[0179] In one embodiment, the one or more introduced modifications introduce a new hydrogen bond across the interface of the Fab components. In one embodiment, the one or more introduced modifications introduce a new salt bridge across the interface of the Fab components. Exemplary substitutions are described in WO 2014/150973 and WO 2014/082179.

[0180] In some embodiments, the Fab domain comprises a 192E substitution in the CH1 domain and 114A and 137K substitutions in the CL domain, which introduces a salt-bridge between the CH1 and CL domains (see, Golay et al., 2016, J Immunol 196:3199-211).

[0181] In some embodiments, the Fab domain comprises a 143Q and 188V substitutions in the CH1 domain and 113T and 176V substitutions in the CL domain, which serves to swap hydrophobic and polar regions of contact between the CH1 and CL domain (see, Golay et al., 2016, J Immunol 196:3199-211).

[0182] In some embodiments, the Fab domain can comprise modifications in some or all of the VH, CH1, VL, CL domains to introduce orthogonal Fab interfaces which promote correct assembly of Fab domains (Lewis et al., 2014 Nature Biotechnology 32:191-198). In an embodiment, 39K, 62E modifications are introduced in the VH domain, H172A, F174G modifications are introduced in the CH1 domain, 1R, 38D, (36F) modifications are introduced in the VL domain, and L135Y, S176W modifications are introduced in the CL domain. In another embodiment, a 39Y modification is introduced in the VH domain and a 38R modification is introduced in the VL domain.

[0183] Fab domains can also be modified to replace the native CH1:CL disulfide bond with an engineered disulfide bond, thereby increasing the efficiency of Fab component pairing. For example, an engineered disulfide bond can be introduced by introducing a 126C in the CH1 domain and a 121C in the CL domain (see, Mazor et al., 2015, MAbs 7:377-89).

[0184] Fab domains can also be modified by replacing the CH1 domain and CL domain with alternative domains that promote correct assembly. For example, Wu et al., 2015, MAbs 7:364-76, describes substituting the CH1 domain with the constant domain of the α T cell receptor and substituting the CL domain with the β domain of the T cell receptor, and pairing these domain replacements with an additional charge-charge interaction between the VL and VH domains by introducing a 38D modification in the VL domain and a 39K modification in the VH domain.

[0185] ABMs can comprise a single chain Fab fragment, which is a polypeptide consisting of an antibody heavy chain variable domain (VH), an antibody constant domain 1 (CH1), an antibody light chain variable domain (VL), an antibody light chain constant domain (CL) and a linker. In some embodiments, the antibody domains and the linker have one of the following orders in N-terminal to C-terminal direction: a) VH-CH1-linker-VL-CL, b) VL-CL-linker-VH-CH1, c) VH-CL-linker-VL-CH1 or d) VL-CH1-linker-VH-CL. The linker can be a polypeptide of at least 30 amino acids, preferably between 32 and 50 amino acids. The single chain Fab domains are stabilized via the natural disulfide bond between the CL domain and the CH1 domain.

[0186] In an embodiment, the antibody domains and the linker in the single chain Fab fragment have one of the following orders in N-terminal to C-terminal direction: a) VH-CH1-linker-VL-CL, or b) VL-CL-linker-VH-CH1, more preferably VL-CL-linker-VH-CH1.

[0187] In another embodiment, the antibody domains and the linker in the single chain Fab fragment have one of the following orders in N-terminal to C-terminal direction: a) VH-CL-linker-VL-CH1 or b) VL-CH1-linker-VH-CL.

[0188] Optionally in the single chain Fab fragment, additionally to the natural disulfide bond between the CL-domain and the CH1 domain, also the antibody heavy chain variable domain (VH) and the antibody light chain variable domain (VL) are disulfide stabilized by introduction of a disulfide bond between the following positions: i) heavy chain variable domain position 44 to light chain variable domain position 100, ii) heavy chain variable domain position 105 to light chain variable domain position 43, or iii) heavy chain variable domain position 101 to light chain variable domain position 100 (numbering according to EU index of Kabat).

[0189] Such further disulfide stabilization of single chain Fab fragments is achieved by the introduction of a disulfide bond between the variable domains VH and VL of the single chain Fab fragments. Techniques to introduce unnatural disulfide bridges for stabilization for a single chain Fv are described e.g. in WO 94/029350, Rajagopal et al., 1997, Prot. Engin. 10:1453-59; Kobayashi et al., 1998, Nuclear Medicine & Biology, 25:387-393; and Schmidt, et al., 1999, Oncogene 18:1711-1721. In one embodiment the optional disulfide bond between the variable domains of the single chain Fab fragments is between heavy chain variable domain position 44 and light chain variable domain position 100. In one embodiment the optional disulfide bond between the variable domains of the single chain Fab fragments is between heavy chain variable domain position 105 and light chain variable domain position 43 (numbering according to EU index of Kabat).

[0190] 7.3.1.2. scFv

[0191] Single chain Fv or “scFv” antibody fragments comprise the VH and VL domains of an antibody in a single polypeptide chain, are capable of being expressed as a single chain polypeptide, and retain the specificity of the intact antibody from which it is derived. Generally, the scFv polypeptide further comprises a polypeptide linker between the VH and VL domain that enables the scFv to form the desired structure for target binding. Examples of linkers suitable for connecting the VH and VL chains of a scFV are the ABM linkers identified in Section 7.4.3, for example any of the linkers designated L1 through L54.

[0192] Unless specified, as used herein an scFv can have the VL and VH variable regions in either order, e.g., with respect to the N-terminal and C-terminal ends of the polypeptide, the scFv can comprise VL-linker-VH or can comprise VH-linker-VL.

[0193] To create an scFv-encoding nucleic acid, the VH and VL-encoding DNA fragments are operably linked to another fragment encoding a linker, e.g., encoding any of the ABM linkers described in Section 7.4.3 (such as the amino acid sequence (Gly4^{˜}Ser)3), such that the VH and VL sequences can be expressed as a contiguous single-chain protein, with the VL and VH regions joined by the flexible linker (see e.g., Bird et al., 1988, Science 242:423-426; Huston et al., 1988, Proc. Natl. Acad. Sci. USA 85:5879-5883; McCafferty et al., 1990, Nature 348:552-554).

[0194] 7.3.1.3. Other Immunoglobulin-Based Modules

[0195] MBMs can also comprise ABMs having an immunoglobulin format which is other than Fab or scFv, for example Fv, dsFv, (Fab′)2, a single domain antibody (SDAB), a VH or VL domain, or a camelid VHH domain (also called a nanobody).

[0196] An ABM can be a single domain antibody composed of a single VH or VL domain which exhibits sufficient affinity to the target. In a specific embodiment, the single domain antibody is a camelid VHH domain (see, e.g., Riechmann, 1999, Journal of Immunological Methods 231:25-38; WO 94/04678).

[0197] 7.3.2. Non-Immunoglobulin Based Modules

[0198] In certain embodiments, one or more of the ABMs are derived from non-antibody scaffold proteins (including, but not limited to, designed ankyrin repeat proteins (DARPins), Avimers (short for avidity multimers), Anticalin/Lipocalins, Centyrins, Kunitz domains, Adnexins, Affilins, Affitins (also known as Nonfitins), Knottins, Pronectins, Versabodies, Duocalins, and Fynomers), ligands, receptors, cytokines or chemokines.

[0199] Non-immunoglobulin scaffolds that can be used in the MBMs include those listed in Tables 3 and 4 of Mintz and Crea, 2013, Bioprocess International 11(2):40-48; in FIG. 1, Table 1 and Figure I of Vazquez-Lombardi et al., 2015, Drug Discovery Today 20(10):1271-83; in Table 1 and Box 2 of Skrlec et al., 2015, Trends in Biotechnology 33(7):408-18. The contents of Tables 3 and 4 of Mintz and Crea, 2013, Bioprocess International 11(2):40-48; in FIG. 1, Table 1 and Figure I of Vazquez-Lombardi et al., 2015, Drug Discovery Today 20(10):1271-83; in Table 1 and Box 2 of Skrlec et al., 2015, Trends in Biotechnology 33(7):408-18 (collectively, “Scaffold Disclosures”) are incorporated by reference herein. In a particular embodiment, the Scaffold Disclosures are incorporated by reference for what they disclose relating to Adnexins. In another embodiment, the Scaffold Disclosures are incorporated by reference for what they disclose relating to Avimers. In another embodiment, the Scaffold Disclosures are incorporated by reference for what they disclose relating to Affibodies. In yet another embodiment, the Scaffold Disclosures are incorporated by reference for what they disclose relating to Anticalins. In yet another embodiment, the Scaffold Disclosures are incorporated by reference for what they disclose relating to DARPins. In yet another embodiment, the Scaffold Disclosures are incorporated by reference for what they disclose relating to Kunitz domains. In yet another embodiment, the Scaffold Disclosures are incorporated by reference for what they disclose relating to Knottins. In yet another embodiment, the Scaffold Disclosures are incorporated by reference for what they disclose relating to Pronectins. In yet another embodiment, the Scaffold Disclosures are incorporated by reference for what they disclose relating to Nanofitins. In yet another embodiment, the Scaffold Disclosures are incorporated by reference for what they disclose relating to Affilins. In yet another embodiment, the Scaffold Disclosures are incorporated by reference for what they disclose relating to Adnectins. In yet another embodiment, the Scaffold Disclosures are incorporated by reference for what they disclose relating to ABMs. In yet another embodiment, the Scaffold Disclosures are incorporated by reference for what they disclose relating to Adhirons. In yet another embodiment, the Scaffold Disclosures are incorporated by reference for what they disclose relating to Affimers. In yet another embodiment, the Scaffold Disclosures are incorporated by reference for what they disclose relating to Alphabodies. In yet another embodiment, the Scaffold Disclosures are incorporated by reference for what they disclose relating to Armadillo Repeat Proteins. In yet another embodiment, the Scaffold Disclosures are incorporated by reference for what they disclose relating to Atrimers/Tetranectins. In yet another embodiment, the Scaffold Disclosures are incorporated by reference for what they disclose relating to Obodies/OB-folds. In yet another embodiment, the Scaffold Disclosures are incorporated by reference for what they disclose relating to Centyrins. In yet another embodiment, the Scaffold Disclosures are incorporated by reference for what they disclose relating to Repebodies. In yet another embodiment, the Scaffold Disclosures are incorporated by reference for what they disclose relating to Anticalins. In yet another embodiment, the Scaffold Disclosures are incorporated by reference for what they disclose relating to Atrimers. In yet another embodiment, the Scaffold Disclosures are incorporated by reference for what they disclose relating to bicyclic peptides. In yet another embodiment, the Scaffold Disclosures are incorporated by reference for what they disclose relating to cys-knots. In yet another embodiment, the Scaffold Disclosures are incorporated by reference for what they disclose relating to Fn3 scaffolds (including Adnectins, Centryrins, Pronectins, and Tn3).

[0200] In an embodiment, an ABM can be a designed ankyrin repeat protein (“DARPin”). DARPins are antibody mimetic proteins that typically exhibit highly specific and high-affinity target protein binding. They are typically genetically engineered and derived from natural ankyrin proteins and consist of at least three, usually four or five repeat motifs of these proteins. Their molecular mass is about 14 or 18 kDa (kilodaltons) for four- or five-repeat DARPins, respectively. Examples of DARPins can be found, for example in U.S. Pat. No. 7,417,130. Multispecific binding molecules comprising DARPin binding modules and immunoglobulin-based binding modules are disclosed in, for example, U.S. Publication No. 2015/0030596 A1.

[0201] In another embodiment, an ABM can be an Affibody. An Affibody is well known in the art and refers to affinity proteins based on a 58 amino acid residue protein domain, derived from one of the IgG binding domain of staphylococcal protein A.

[0202] In another embodiment, an ABM can be an Anticalin. Anticalins are well known in the art and refer to another antibody mimetic technology, wherein the binding specificity is derived from Lipocalins. Anticalins can also be formatted as dual targeting protein, called Duocalins.

[0203] In another embodiment, an ABM can be a Versabody. Versabodies are well known in the art and refer to another antibody mimetic technology. They are small proteins of 3-5 kDa with >15% cysteines, which form a high disulfide density scaffold, replacing the hydrophobic core the typical proteins have.

[0204] Other non-immunoglobulin ABMs include “A” domain oligomers (also known as Avimers) (see for example, U.S. Patent Application Publication Nos. 2005/0164301, 2005/0048512, and 2004/017576), Fn3 based protein scaffolds (see for example, U.S. Patent Application Publication 2003/0170753), VASP polypeptides, Avian pancreatic polypeptide (aPP), Tetranectin (based on CTLD3), Affililin (based on γB-crystallin/ubiquitin), Knottins, SH3 domains, PDZ domains, Tendamistat, Neocarzinostatin, Protein A domains, Lipocalins, Transferrin, and Kunitz domains. In one aspect, ABMs useful in the construction of the MBMs comprise fibronectin-based scaffolds as exemplified in WO 2011/130324.

[0205] Moreover, in certain aspects, an ABM comprises a ligand binding domain of a receptor or a receptor binding domain of a ligand. For example, if the TAA is the EGF receptor, ABM3 can comprise a portion of EGF that binds EGFR, and if the TAA is the PDGF receptor, ABM3 can comprise a portion of PDGF receptor that binds PDGF, and so forth. In a specific embodiment, ABM1 is a CD2 ligand, in particular a CD58 moiety as described in Section 7.9.2. The respective binding domains of numerous ligand/receptor pairs are well known in the art, and thus can be readily selected and adapted for use in the MBMs.

### 7.4. Connectors

[0206] It is contemplated that the CD3 binding molecules (e.g., MBMs) can in some instances include pairs of ABMs or ABM chains (e.g., the VH-CH1 or VL-CL component of a Fab) connected directly to one another, e.g., as a fusion protein without a linker. For example, the CD3 binding molecules (e.g., MBMs) comprise connector moieties linking individual ABMs or ABM chains. The use of connector moieties can improve target binding, for example by increasing flexibility of the ABMs within a CD3 binding molecule (e.g., MBM) and thus reducing steric hindrance. The ABMs can be connected to one another through, for example, Fc domains (each Fc domain representing a pair of associated Fc regions) and/or ABM linkers. The use of Fc domains will typically require the use of hinge regions as connectors of the ABMs or ABM chains for optimal antigen binding. Thus, the term “connector” encompasses, but is not limited to, Fc regions, Fc domains, hinge regions, and ABM linkers.

[0207] Examples of Fc domains (formed by the pairing of two Fc regions), hinge regions and ABM linkers are described in Sections 7.4.1, 7.4.2, and 7.4.3, respectively.

[0208] 7.4.1. Fc Domains

[0209] The CD3 binding molecules (e.g., MBMs) can include an Fc domain derived from any suitable species. In one embodiment, the Fc domain is derived from a human Fc domain.

[0210] The Fc domain can be derived from any suitable class of antibody, including IgA (including subclasses IgA1 and IgA2), IgD, IgE, IgG (including subclasses IgG1, IgG2, IgG3 and IgG4), and IgM. In one embodiment, the Fc domain is derived from IgG1, IgG2, IgG3 or IgG4. In one embodiment, the Fc domain is derived from IgG1. In one embodiment, the Fc domain is derived from IgG4.

[0211] The Fc domain comprises two polypeptide chains, each referred to as a heavy chain Fc region. The two heavy chain Fc regions dimerize to create the Fc domain. The two Fc regions within the Fc domain can be the same or different from one another. In a native antibody, the Fc regions are typically identical, but for the purpose of producing multispecific binding molecules, e.g., the MBMs, the Fc regions might advantageously be different to allow for heterodimerization, as described in Section 7.4.1.5 below.

[0212] Typically, each heavy chain Fc region comprises or consists of two or three heavy chain constant domains.

[0213] In native antibodies, the heavy chain Fc region of IgA, IgD and IgG is composed of two heavy chain constant domains (CH2 and CH3) and that of IgE and IgM is composed of three heavy chain constant domains (CH2, CH3 and CH4). These dimerize to create an Fc domain.

[0214] In the present disclosure, the heavy chain Fc region can comprise heavy chain constant domains from one or more different classes of antibody, for example one, two or three different classes.

[0215] In one embodiment, the heavy chain Fc region comprises CH2 and CH3 domains derived from IgG1.

[0216] In one embodiment, the heavy chain Fc region comprises CH2 and CH3 domains derived from IgG2.

[0217] In one embodiment, the heavy chain Fc region comprises CH2 and CH3 domains derived from IgG3.

[0218] In one embodiment, the heavy chain Fc region comprises CH2 and CH3 domains derived from IgG4.

[0219] In one embodiment, the heavy chain Fc region comprises a CH4 domain from IgM. The IgM CH4 domain is typically located at the C-terminus of the CH3 domain.

[0220] In one embodiment, the heavy chain Fc region comprises CH2 and CH3 domains derived from IgG and a CH4 domain derived from IgM.

[0221] It will be appreciated that the heavy chain constant domains for use in producing a heavy chain Fc region for the CD3 binding molecules (e.g., MBMs) of the present disclosure can include variants of the naturally occurring constant domains described above. Such variants can comprise one or more amino acid variations compared to wild type constant domains. In one example, the heavy chain Fc region of the present disclosure comprises at least one constant domain that varies in sequence from the wild type constant domain. It will be appreciated that the variant constant domains can be longer or shorter than the wild type constant domain. Preferably, the variant constant domains are at least 60% identical or similar to a wild type constant domain. In another example, the variant constant domains are at least 70% identical or similar. In another example, the variant constant domains are at least 80% identical or similar. In another example, the variant constant domains are at least 90% identical or similar. In another example, the variant constant domains are at least 95% identical or similar. Exemplary Fc variants are described in Sections 7.4.1.1 through 7.4.1.5.

[0222] IgM and IgA occur naturally in humans as covalent multimers of the common H2L2 antibody unit. IgM occurs as a pentamer when it has incorporated a J-chain or as a hexamer when it lacks a J-chain. IgA occurs as monomer and dimer forms. The heavy chains of IgM and IgA possess an 18 amino acid extension to the C-terminal constant domain, known as a tailpiece. The tailpiece includes a cysteine residue that forms a disulfide bond between heavy chains in the polymer, and is believed to have an important role in polymerization. The tailpiece also contains a glycosylation site. In certain embodiments, the CD3 binding molecules (e.g., MBMs) of the present disclosure do not comprise a tailpiece.

[0223] The Fc domains that are incorporated into the CD3 binding molecules (e.g., MBMs) of the present disclosure can comprise one or more modifications that alter the functional properties of the proteins, such as serum half-life, complement fixation, Fc receptor binding, and/or antigen-dependent cellular cytotoxicity. Furthermore, a CD3 binding molecule can be chemically modified (e.g., one or more chemical moieties can be attached to the CD3 binding molecule) or be modified to alter its glycosylation, again to alter one or more functional properties of the CD3 binding molecule.

[0224] Effector function of an antibody molecule includes complement-mediated effector function, which is mediated by, for example, binding of the C1 component of the complement to the antibody. Activation of complement is important in the opsonization and direct lysis of pathogens. In addition, it stimulates the inflammatory response by recruiting and activating phagocytes to the site of complement activation. Effector function includes Fc receptor (FcR)-mediated effector function, which can be triggered upon binding of the constant domains of an antibody to an Fc receptor (FcR). Antigen-antibody complex-mediated crosslinking of Fc receptors on effector cell surfaces triggers a number of important and diverse biological responses including engulfment and destruction of antibody-coated particles, clearance of immune complexes, lysis of antibody-coated target cells by killer cells (called antibody-dependent cell-mediated cytotoxicity, or ADCC), release of inflammatory mediators, placental transfer and control of immunoglobulin production.

[0225] Fc regions can be altered by replacing at least one amino acid residue with a different amino acid residue to alter the effector functions. For example, one or more amino acids can be replaced with a different amino acid residue such that the Fc region has an altered affinity for an effector ligand. The effector ligand to which affinity is altered can be, for example, an Fc receptor or the C1 component of complement. This approach is described in, e.g., U.S. Pat. Nos. 5,624,821 and 5,648,260, both by Winter et al. Modified Fc regions can also alter C1q binding and/or reduce or abolish complement dependent cytotoxicity (CDC). This approach is described in, e.g., U.S. Pat. No. 6,194,551 by Idusogie et al. Modified Fc regions can also alter the ability of an Fc region to fix complement. This approach is described in, e.g., the PCT Publication WO 94/29351 by Bodmer et al. Allotypic amino acid residues include, but are not limited to, constant region of a heavy chain of the IgG1, IgG2, and IgG3 subclasses as well as constant region of a light chain of the kappa isotype as described by Jefferis et al., 2009, MAbs, 1:332-338.

[0226] Fc regions can also be modified to “silence” the effector function, for example, to reduce or eliminate the ability of a CD3 binding molecule to mediate antibody dependent cellular cytotoxicity (ADCC) and/or antibody dependent cellular phagocytosis (ADCP). This can be achieved, for example, by introducing a mutation in an Fc region. Such mutations have been described in the art: LALA and N297A (Strohl, 2009, Curr. Opin. Biotechnol. 20(6):685-691); and D265A (Baudino et al., 2008, J. Immunol. 181: 6664-69; Strohl, supra). Examples of silent Fc IgG1 antibodies comprise the so-called LALA mutant comprising L234A and L235A mutation in the IgG1 Fc amino acid sequence. Another example of a silent IgG1 antibody comprises the D265A mutation. Another silent IgG1 antibody comprises the so-called DAPA mutant comprising D265A and P329A mutations in the IgG1 Fc amino acid sequence. Another silent IgG1 antibody comprises the N297A mutation, which results in aglycosylated/non-glycosylated antibodies.

[0227] Fc regions can be modified to increase the ability of a CD3 binding molecule containing the Fc region to mediate antibody dependent cellular cytotoxicity (ADCC) and/or antibody dependent cellular phagocytosis (ADCP), for example, by modifying one or more amino acid residues to increase the affinity of the CD3 binding molecule for an activating Fcγ receptor, or to decrease the affinity of the CD3 binding molecule for an inhibitory Fcγ receptor. Human activating Fcγ receptors include FcγRIa, FcγRIIa, FcγRIIIa, and FcγRIIIb, and human inhibitory Fcγ receptor includes FcγRIIb. This approach is described in, e.g., the PCT Publication WO 00/42072 by Presta. Moreover, binding sites on human IgG1 for FcγRI, FcγRII, FcγRIII and FcRn have been mapped and variants with improved binding have been described (see Shields et al., J. Biol. Chem. 276:6591-6604, 2001). Optimization of Fc-mediated effector functions of monoclonal antibodies such as increased ADCC/ADCP function has been described (see Strohl, 2009, Current Opinion in Biotechnology 20:685-691). Mutations that can enhance ADCC/ADCP function include one or more mutations selected from G236A, S239D, F243L, P247I, D280H, K290S, R292P, S298A, S298D, S298V, Y300L, V305I, A330L, I332E, E333A, K334A, A339D, A339Q, A339T, and P396L (all positions by EU numbering).

[0228] Fc regions can also be modified to increase the ability of a CD3 binding molecule to mediate ADCC and/or ADCP, for example, by modifying one or more amino acids to increase the affinity of the CD3 binding molecule for an activating receptor that would typically not recognize the parent CD3 binding molecule, such as FcαRI. This approach is described in, e.g., Borrok et al., 2015, mAbs. 7(4):743-751.

[0229] Accordingly, in certain aspects, the CD3 binding molecules of the present disclosure can include Fc domains with altered effector function such as, but not limited to, binding to Fc-receptors such as FcRn or leukocyte receptors (for example, as described in Section 7.4.1.1), binding to complement (for example as described in Section 7.4.1.2), modified disulfide bond architecture (for example as described in Section 7.4.1.3), or altered glycosylation patterns (for example as described in Section 7.4.1.4). The Fc domains can also be altered to include modifications that improve manufacturability of asymmetric CD3 binding molecules (e.g., MBMs), for example by allowing heterodimerization, which is the preferential pairing of non-identical Fc regions over identical Fc regions. Heterodimerization permits the production of CD3 binding molecules (e.g., MBMs) in which different ABMs are connected to one another by an Fc domain containing Fc regions that differ in sequence. Examples of heterodimerization strategies are exemplified in Section 7.4.1.5 (and subsections thereof).

[0230] It will be appreciated that any of the modifications described in Sections 7.4.1.1 through 7.4.1.5 can be combined in any suitable manner to achieve the desired functional properties and/or combined with other modifications to alter the properties of the CD3 binding molecules (e.g., MBMs).

[0231] 7.4.1.1. Fc Domains with Altered FcR Binding

[0232] The Fc domains of the CD3 binding molecules (e.g., MBMs) can show altered binding to one or more Fc-receptors (FcRs) in comparison with the corresponding native immunoglobulin. The binding to any particular Fc-receptor can be increased or decreased. In one embodiment, the Fc domain comprises one or more modifications which alter its Fc-receptor binding profile.

[0233] Human cells can express a number of membrane bound FcRs selected from FcαR, FcεR, FcγR, FcRn and glycan receptors. Some cells are also capable of expressing soluble (ectodomain) FcR (Fridman et al., 1993, J Leukocyte Biology 54: 504-512 for review). FcγR can be further divided by affinity of IgG binding (high/low) and biological effect (activating/inhibiting). Human FcγRI is widely considered the sole ‘high affinity’ receptor whilst all of the others are considered as medium to low. FcγRIIb is the sole receptor with ‘inhibitory’ functionality by virtue of its intracellular ITIM motif whilst all of the others are considered as ‘activating’ by virtue of ITAM motifs or pairing with the common FcγR-γchain. FcγRIIIb is also unique in that although activatory it associates with the cell via a GPI anchor. In total, humans express six “standard” FcγRs: FcγRI, FcγRIIa, FcγRIIb, FcγRIIc, FcγRIIIa FcγRIIIb. In addition to these sequences, there are a large number of sequence or allotypic variants spread across these families. Some of these have been found to have important functional consequence and so are sometimes considered receptor sub-types of their own. Examples include FcγRIIa^{H134R}, FcγRIIb^{I190T}, FcγRIIIa^{F158V} and FcγRIIIb^{NA1}, FcγRIIIb^{NA2} FcγRIII^{SH}. Each receptor sequence has been shown to have different affinities for the four sub-classes of IgG: IgG1, IgG2, IgG3 and IgG4 (Bruhns, 1993, Blood 113:3716-3725). Other species have somewhat different numbers and functionality of FcγR, with the mouse system being the best studied to date and comprising of four FcγR, FcγRI FcγRIIb FcγRIII FcγRIV (Bruhns, 2012, Blood 119:5640-5649). Human FcγRI on cells is normally considered to be ‘occupied’ by monomeric IgG in normal serum conditions due to its affinity for IgG1/IgG3/IgG4 (about 10⁻⁸ M) and the concentration of these IgG in serum (about 10 mg/ml). Hence, cells bearing FcγRI on their surface are considered capable for “screening” or “sampling” of their antigenic environment vicariously through the bound polyspecific IgG. The other receptors having lower affinities for IgG sub-classes (in the range of about 10⁻⁵-10⁻⁷ M) are normally considered to be “unoccupied.” The low affinity receptors are hence inherently sensitive to the detection of and activation by antibody involved immune complexes. The increased Fc density in an antibody immune complex results in increased functional affinity of binding avidity to low affinity FcγR. This has been demonstrated in vitro using a number of methods (Shields et al., 2001, J Biol Chem 276(9):6591-6604; Lux et al., 2013, J Immunol 190:4315-4323). It has also been implicated as being one of the primary modes of action in the use of anti-RhD to treat ITP in humans (Crow, 2008, Transfusion Medicine Reviews 22:103-116).

[0234] Many cell types express multiple types of FcγR and so binding of IgG or antibody immune complex to cells bearing FcγR can have multiple and complex outcomes depending upon the biological context. Most simply, cells can either receive an activatory, inhibitory or mixed signal. This can result in events such as phagocytosis (e.g., macrophages and neutrophils), antigen processing (e.g., dendritic cells), reduced IgG production (e.g., B-cells) or degranulation (e.g., neutrophils, mast cells). There are data to support that the inhibitory signal from FcγRIIb can dominate that of activatory signals (Proulx, 2010, Clinical Immunology 135:422-429).

[0235] FcRn has a crucial role in maintaining the long half-life of IgG in the serum of adults and children. The receptor binds IgG in acidified vesicles (pH<6.5) protecting the IgG molecule from degradation, and then releasing it at the higher pH of 7.4 in blood.

[0236] FcRn is unlike leukocyte Fc receptors, and instead, has structural similarity to MHC class I molecules. It is a heterodimer composed of a β₂-microglobulin chain, non-covalently attached to a membrane-bound chain that includes three extracellular domains. One of these domains, including a carbohydrate chain, together with β₂-microglobulin interacts with a site between the CH2 and CH3 domains of Fc. The interaction includes salt bridges made to histidine residues on IgG that are positively charged at pH<6.5. At higher pH, the His residues lose their positive charges, the FcRn-IgG interaction is weakened and IgG dissociates.

[0237] In one embodiment, a CD3 binding molecule (e.g., MBM) comprises an Fc domain that binds to human FcRn.

[0238] In one embodiment, the Fc domain has an (e.g., one or two) Fc regions comprising a histidine residue at position 310, and preferably also at position 435. These histidine residues are important for human FcRn binding. In one embodiment, the histidine residues at positions 310 and 435 are native residues, i.e., positions 310 and 435 are not modified. Alternatively, one or both of these histidine residues can be present as a result of a modification.

[0239] The CD3 binding molecules (e.g., MBMs) can comprise one or more Fc regions that alter Fc binding to FcRn. The altered binding can be increased binding or decreased binding.

[0240] In one embodiment, the CD3 binding molecule (e.g., MBM) comprises an Fc domain in which at least one (and optionally both) Fc regions comprises one or more modifications such that it binds to FcRn with greater affinity and avidity than the corresponding native immunoglobulin.

[0241] In one embodiment, the Fc region is modified by substituting the threonine residue at position 250 with a glutamine residue (T250Q).

[0242] In one embodiment, the Fc region is modified by substituting the methionine residue at position 252 with a tyrosine residue (M252Y)

[0243] In one embodiment, the Fc region is modified by substituting the serine residue at position 254 with a threonine residue (S254T).

[0244] In one embodiment, the Fc region is modified by substituting the threonine residue at position 256 with a glutamic acid residue (T256E).

[0245] In one embodiment, the Fc region is modified by substituting the threonine residue at position 307 with an alanine residue (T307A).

[0246] In one embodiment, the Fc region is modified by substituting the threonine residue at position 307 with a proline residue (T307P).

[0247] In one embodiment, the Fc region is modified by substituting the valine residue at position 308 with a cysteine residue (V308C).

[0248] In one embodiment, the Fc region is modified by substituting the valine residue at position 308 with a phenylalanine residue (V308F).

[0249] In one embodiment, the Fc region is modified by substituting the valine residue at position 308 with a proline residue (V308P).

[0250] In one embodiment, the Fc region is modified by substituting the glutamine residue at position 311 with an alanine residue (Q311A).

[0251] In one embodiment, the Fc region is modified by substituting the glutamine residue at position 311 with an arginine residue (Q311R).

[0252] In one embodiment, the Fc region is modified by substituting the methionine residue at position 428 with a leucine residue (M428L).

[0253] In one embodiment, the Fc region is modified by substituting the histidine residue at position 433 with a lysine residue (H433K).

[0254] In one embodiment, the Fc region is modified by substituting the asparagine residue at position 434 with a phenylalanine residue (N434F).

[0255] In one embodiment, the Fc region is modified by substituting the asparagine residue at position 434 with a tyrosine residue (N434Y).

[0256] In one embodiment, the Fc region is modified by substituting the methionine residue at position 252 with a tyrosine residue, the serine residue at position 254 with a threonine residue, and the threonine residue at position 256 with a glutamic acid residue (M252Y/S254T/T256E).

[0257] In one embodiment, the Fc region is modified by substituting the valine residue at position 308 with a proline residue and the asparagine residue at position 434 with a tyrosine residue (V308P/N434Y).

[0258] In one embodiment, the Fc region is modified by substituting the methionine residue at position 252 with a tyrosine residue, the serine residue at position 254 with a threonine residue, the threonine residue at position 256 with a glutamic acid residue, the histidine residue at position 433 with a lysine residue and the asparagine residue at position 434 with a phenylalanine residue (M252Y/S254T/T256E/H433K/N434F).

[0259] It will be appreciated that any of the modifications listed above can be combined to alter FcRn binding.

[0260] In one embodiment, the CD3 binding molecule (e.g., MBM) comprises an Fc domain in which one or both Fc regions comprise one or more modifications such that the Fc domain binds to FcRn with lower affinity and avidity than the corresponding native immunoglobulin.

[0261] In one embodiment, the Fc region comprises any amino acid residue other than histidine at position 310 and/or position 435.

[0262] The CD3 binding molecule (e.g., MBM) can comprise an Fc domain in which one or both Fc regions comprise one or more modifications, which increase its binding to FcγRIIb. FcγRIIb is the only inhibitory receptor in humans and the only Fc receptor found on B cells.

[0263] In one embodiment, the Fc region is modified by substituting the proline residue at position 238 with an aspartic acid residue (P238D).

[0264] In one embodiment, the Fc region is modified by substituting the glutamic acid residue at position 258 with an alanine residue (E258A).

[0265] In one embodiment, the Fc region is modified by substituting the serine residue at position 267 with an alanine residue (S267A).

[0266] In one embodiment, the Fc region is modified by substituting the serine residue at position 267 with a glutamic acid residue (S267E).

[0267] In one embodiment, the Fc region is modified by substituting the leucine residue at position 328 with a phenylalanine residue (L328F).

[0268] In one embodiment, the Fc region is modified by substituting the glutamic acid residue at position 258 with an alanine residue and the serine residue at position 267 with an alanine residue (E258A/S267A).

[0269] In one embodiment, the Fc region is modified by substituting the serine residue at position 267 with a glutamic acid residue and the leucine residue at position 328 with a phenylalanine residue (S267E/L328F).

[0270] It will be appreciated that any of the modifications listed above can be combined to increase FcγRIIb binding.

[0271] In one embodiment, CD3 binding molecules (e.g., MBMs) are provided comprising Fc domains which display decreased binding to FcγR.

[0272] In one embodiment, a CD3 binding molecule (e.g., MBM) comprises an Fc domain in which one or both Fc regions comprise one or more modifications that decrease Fc binding to FcγR.

[0273] The Fc domain can be derived from IgG1.

[0274] In one embodiment, the Fc region is modified by substituting the leucine residue at position 234 with an alanine residue (L234A).

[0275] In one embodiment, the Fc region is modified by substituting the leucine residue at position 235 with an alanine residue (L235A).

[0276] In one embodiment, the Fc region is modified by substituting the glycine residue at position 236 with an arginine residue (G236R).

[0277] In one embodiment, the Fc region is modified by substituting the asparagine residue at position 297 with an alanine residue (N297A) or a glutamine residue (N297Q).

[0278] In one embodiment, the Fc region is modified by substituting the serine residue at position 298 with an alanine residue (S298A).

[0279] In one embodiment, the Fc region is modified by substituting the leucine residue at position 328 with an arginine residue (L328R).

[0280] In one embodiment, the Fc region is modified by substituting the leucine residue at position 234 with an alanine residue and the leucine residue at position 235 with an alanine residue (L234A/L235A).

[0281] In one embodiment, the Fc region is modified by substituting the phenylalanine residue at position 234 with an alanine residue and the leucine residue at position 235 with an alanine residue (F234A/L235A).

[0282] In one embodiment, the Fc region is modified by substituting the glycine residue at position 236 with an arginine residue and the leucine residue at position 328 with an arginine residue (G236R/L328R).

[0283] It will be appreciated that any of the modifications listed above can be combined to decrease FcγR binding.

[0284] In one embodiment, a CD3 binding molecule (e.g., MBM) of the present disclosure comprises an Fc domain in which one or both Fc regions comprise one or more modifications that decrease Fc binding to FcγRIIIa without affecting the Fc's binding to FcγRII.

[0285] In one embodiment, the Fc region is modified by substituting the serine residue at position 239 with an alanine residue (S239A).

[0286] In one embodiment, the Fc region is modified by substituting the glutamic acid residue at position 269 with an alanine residue (E269A).

[0287] In one embodiment, the Fc region is modified by substituting the glutamic acid residue at position 293 with an alanine residue (E293A).

[0288] In one embodiment, the Fc region is modified by substituting the tyrosine residue at position 296 with a phenylalanine residue (Y296F).

[0289] In one embodiment, the Fc region is modified by substituting the valine residue at position 303 with an alanine residue (V303A).

[0290] In one embodiment, the Fc region is modified by substituting the alanine residue at position 327 with a glycine residue (A327G).

[0291] In one embodiment, the Fc region is modified by substituting the lysine residue at position 338 with an alanine residue (K338A).

[0292] In one embodiment, the Fc region is modified by substituting the aspartic acid residue at position 376 with an alanine residue (D376A).

[0293] It will be appreciated that any of the modifications listed above can be combined to decrease FcγRIIIa binding.

[0294] Fc region variants with decreased FcR binding can be referred to as “FcγR ablation variants,” “FcγR silencing variants” or “Fc knock out (FcKO or KO)” variants. For some therapeutic applications, it is desirable to reduce or remove the normal binding of an Fc domain to one or more or all of the Fcγ receptors (e.g., FcγR1, FcγRIIa, FcγRIIb, FcγRIIIa) to avoid additional mechanisms of action. That is, for example, in many embodiments, particularly in the use of MBMs that bind CD3 monovalently, it is generally desirable to ablate FcγRIIIa binding to eliminate or significantly reduce ADCC activity. In some embodiments, at least one of the Fc regions of the MBMs described herein comprises one or more Fcγ receptor ablation variants. In some embodiments, both of the Fc regions comprise one or more Fcγ receptor ablation variants. These ablation variants are depicted in Table 3, and each can be independently and optionally included or excluded, with some aspects utilizing ablation variants selected from the group consisting of G236R/L328R, E233P/L234V/L235A/G236del/S239K, E233P/L234V/L235A/G236del/S267K, E233P/L234V/L235A/G236del/S239K/A327G, E233P/L234V/L235A/G236del/S267K/A327G and E233P/L234V/L235A/G236del (“del” connotes a deletion, e.g., G236del refers to a deletion of the glycine at position 236). It should be noted that the ablation variants referenced herein ablate FcγR binding but generally not FcRn binding.

TABLE 3
Ablation Variants

| Variant | Variant(s), cont. |
|---|---|
| G236R | P329K |
| S239G | A330L |
| S239K | A330S/P331S |
| S239Q | I332K |
| S239R | I332R |
| V266D | V266D/A327Q |
| S267K | V266D/P329K |
| S267R | S267R/A327Q |
| H268K | S267R/P329K |
| E269R | G236R/L328R |
| 299R | E233P/L234V/L235A/G236del/S239K |
| 299K | E233P/L234V/L235A/G236del/S267K |
| K322A | E233P/L234V/L235A/G236del/S239K/A327G |
| A327G | E233P/L234V/L235A/G236del/S267K/A327G |
| A327L | E233P/L234V/L235A/G236del |
| A327N | S239K/S267K |
| A327Q | 267K/P329K |
| L328E | |
| L328R | |
| P329A | |
| P329H | |

[0295] In some embodiments, a CD3 binding molecule (e.g., MBM) of the present disclosure comprises a first Fc region and a second Fc region. In some embodiments, the first Fc region and/or the second Fc region can comprise the following mutations: E233P, L234V, L235A, G236del, and S267K.

[0296] The Fc domain of human IgG1 has the highest binding to the Fcγ receptors, and thus ablation variants can be used when the constant domain (or Fc domain) in the backbone of the heterodimeric antibody is IgG1.

[0297] Alternatively, or in addition to ablation variants in an IgG1 background, mutations at the glycosylation position 297, e.g., substituting the asparagine residue at position 297 with an alanine residue (N297A) or a glutamine residue (N297Q), can significantly ablate binding to FcγRIIIa, for example. Human IgG2 and IgG4 have naturally reduced binding to the Fcγ receptors, and thus those backbones can be used with or without the ablation variants.

[0298] 7.4.1.2. Fc Domains with Altered Complement Binding

[0299] The CD3 binding molecule (e.g., MBM) can comprise an Fc domain in which one or both Fc regions comprises one or more modifications that alter Fc binding to complement. Altered complement binding can be increased binding or decreased binding.

[0300] In one embodiment, the Fc region comprises one or more modifications, which decrease its binding to C1q. Initiation of the classical complement pathway starts with binding of hexameric C1q protein to the CH2 domain of antigen bound IgG and IgM.

[0301] In one embodiment, the CD3 binding molecule (e.g., MBM) comprises an Fc domain in which one or both Fc regions comprises one or more modifications to decrease Fc binding to C1q.

[0302] In one embodiment, the Fc region is modified by substituting the leucine residue at position 234 with an alanine residue (L234A).

[0303] In one embodiment, the Fc region is modified by substituting the leucine residue at position 235 with an alanine residue (L235A).

[0304] In one embodiment, the Fc region is modified by substituting the leucine residue at position 235 with a glutamic acid residue (L235E).

[0305] In one embodiment, the Fc region is modified by substituting the glycine residue at position 237 with an alanine residue (G237A).

[0306] In one embodiment, the Fc region is modified by substituting the lysine residue at position 322 with an alanine residue (K322A).

[0307] In one embodiment, the Fc region is modified by substituting the proline residue at position 331 with an alanine residue (P331A).

[0308] In one embodiment, the Fc region is modified by substituting the proline residue at position 331 with a serine residue (P331S).

[0309] In one embodiment, a CD3 binding molecule (e.g., MBM) comprises an Fc domain derived from IgG4. IgG4 has a naturally lower complement activation profile than IgG1, but also weaker binding of FcγR. Thus, in one embodiment, the CD3 binding molecule (e.g., MBM) comprises an IgG4 Fc domain and comprises one or more modifications that increase FcγR binding.

[0310] It will be appreciated that any of the modifications listed above can be combined to reduce C1q binding.

[0311] 7.4.1.3. Fc Domains with Altered Disulfide Architecture

[0312] The CD3 binding molecules (e.g., MBMs) can include an Fc domain comprising one or more modifications to create and/or remove a cysteine residue. Cysteine residues have an important role in the spontaneous assembly of Fc-based multispecific binding molecules, by forming disulfide bridges between individual pairs of polypeptide monomers. Thus, by altering the number and/or position of cysteine residues, it is possible to modify the structure of the CD3 binding molecule (e.g., MBM) to produce a protein with improved therapeutic properties.

[0313] A CD3 binding molecule (e.g., MBM) of the present disclosure can comprise an Fc domain in which one or both Fc regions, preferably both Fc regions, comprise a cysteine residue at position 309. In one embodiment, the cysteine residue at position 309 is created by a modification, e.g., for an Fc domain derived from IgG1, the leucine residue at position 309 is substituted with a cysteine residue (L309C), for an Fc domain derived from IgG2, the valine residue at position 309 is substituted with a cysteine residue (V309C).

[0314] In one embodiment, the Fc region is modified by substituting the valine residue at position 308 with a cysteine residue (V308C).

[0315] In one embodiment, two disulfide bonds in the hinge region are removed by mutating a core hinge sequence CPPC (SEQ ID NO: 9) to SPPS (SEQ ID NO: 14).

[0316] 7.4.1.4. Fc Domains with Altered Glycosylation

[0317] In certain aspects, CD3 binding molecules (e.g., MBMs) with improved manufacturability are provided that comprise fewer glycosylation sites than a corresponding immunoglobulin. These proteins have less complex post translational glycosylation patterns and are thus simpler and less expensive to manufacture.

[0318] In one embodiment, a glycosylation site in the CH2 domain is removed by substituting the asparagine residue at position 297 with an alanine residue (N297A) or a glutamine residue (N297Q). In addition to improved manufacturability, these aglycosyl mutants also reduce FcγR binding as described herein above.

[0319] In some embodiments, a CD3 binding molecule can be made that has an altered type of glycosylation, such as a hypofucosylated antibody having reduced amounts of fucosyl residues or an antibody having increased bisecting GlcNac structures. Such altered glycosylation patterns have been demonstrated to increase the ADCC ability of antibodies. Such carbohydrate modifications can be accomplished by, for example, expressing a CD3 binding molecule in a host cell with altered glycosylation machinery. Cells with altered glycosylation machinery have been described in the art and can be used as host cells in which to express CD3 binding molecules to thereby produce CD3 binding molecules with altered glycosylation. For example, EP 1,176,195 by Hang et al. describes a cell line with a functionally disrupted FUT8 gene, which encodes a fucosyl transferase, such that antibodies expressed in such a cell line exhibit hypofucosylation. PCT Publication WO 03/035835 by Presta describes a variant CHO cell line, Lecl3 cells, with reduced ability to attach fucose to Asn(297)-linked carbohydrates, also resulting in hypofucosylation of antibodies expressed in that host cell (see also Shields et al., 2002, J. Biol. Chem. 277:26733-26740). PCT Publication WO 99/54342 by Umana et al. describes cell lines engineered to express glycoprotein-modifying glycosyl transferases (e.g., beta(1,4)-N acetylglucosaminyltransferase III (GnTIII)) such that antibodies expressed in the engineered cell lines exhibit increased bisecting GlcNac structures which results in increased ADCC activity of the antibodies (see also Umana et al., Nat. Biotech. 17:176-180, 1999).

[0320] 7.4.1.5. Fc Heterodimerization

[0321] Many multispecific molecule formats entail dimerization between two Fc regions that, unlike a native immunoglobulin, are operably linked to non-identical antigen-binding domains (or portions thereof, e.g., a VH or VH-CH1 of a Fab). Inadequate heterodimerization of two Fc regions to form an Fc domain has always been an obstacle for increasing the yield of desired multispecific molecules and represents challenges for purification. A variety of approaches available in the art can be used in for enhancing dimerization of Fc regions that might be present in the CD3 binding molecules (e.g., MBMs) of the disclosure, for example as disclosed in EP 1870459A1; U.S. Pat. Nos. 5,582,996; 5,731,168; 5,910,573; 5,932,448; 6,833,441; 7,183,076; U.S. Patent Application Publication No. 2006204493A1; and PCT Publication No. WO2009/089004A1.

[0322] The present disclosure provides CD3 binding molecules (e.g., MBMs) comprising Fc heterodimers, i.e., Fc domains comprising heterologous, non-identical Fc regions. Heterodimerization strategies are used to enhance dimerization of Fc regions operably linked to different ABMs (or portions thereof, e.g., a VH or VH-CH1 of a Fab) and reduce dimerization of Fc regions operably linked to the same ABM or portion thereof. Typically, each Fc region in the Fc heterodimer comprises a CH3 domain of an antibody. The CH3 domains are derived from the constant region of an antibody of any isotype, class or subclass, and preferably of IgG (IgG1, IgG2, IgG3 and IgG4) class, as described in the preceding section.

[0323] Typically, the MBMs comprise other antibody fragments in addition to CH3 domains, such as, CH1 domains, CH2 domains, hinge domain, VH domain(s), VL domain(s), CDR(s), and/or antigen-binding fragments described herein. In some embodiments, the two hetero-polypeptides are two heavy chains forming a bispecific or multispecific molecules. Heterodimerization of the two different heavy chains at CH3 domains give rise to the desired antibody or antibody-like molecule, while homodimerization of identical heavy chains will reduce yield of the desired antibody or molecule. In an exemplary embodiment, the two or more hetero-polypeptide chains comprise two chains comprising CH3 domains and forming the molecules of any of the multispecific molecule formats described above of the present disclosure. In an embodiment, the two hetero-polypeptide chains comprising CH3 domains comprise modifications that favor heterodimeric association of the polypeptides, relative to unmodified chains. Various examples of modification strategies are provided below in Table 4 and Sections 7.4.1.5.1 to 7.4.1.5.8.

TABLE 4
Fc Heterodimerization Strategies

| NO. | STRATEGY | CH3 DOMAIN 1 | CH3 DOMAIN 2 | REFERENCES |
|---|---|---|---|---|
| Fc 1 | knobs-into-holes | T366Y | Y407T | Ridgway et al., 1996, |
| | (Y-T) | | | Protein Eng 9: 617-21 |
| Fc 2 | knobs-into-holes | S354C, T366W | Y349C, T366S, | Atwell et al., 1997, J |
| | (CW-CSAV) | | L368A, Y407V | Mol Biol. 270(1): 26-35; |
| | | | | Merchant et al., 1998, |
| | | | | Nat Biotechnol 16: |
| | | | | 677-681 |
| Fc 3 | HA-TF | S364H, F405A | Y349T, T394F | Moore et al., 2011, |
| | | | | MAbs 3(6): 546-57 |
| Fc 4 | ZW1 (VYAV-VLLW) | T350V, L351Y, | T350V, T366L, | Von Kreudenstein et |
| | | F405A, Y407V | K392L, T394W | al., 2013, MAbs 5: |
| | | | | 646-54 |
| Fc 5 | CH3 charge pairs | K392D, K409D | E356K, D399K | Gunasekaran et al., |
| | (DD-KK) | | | 2010, J Biol Chem |
| | | | | 285: 19637-46 |
| Fc 6 | IgG1 hingE, CH3 | IgG1: D221E, | IgG1: D221R, | Strop et al., 2012, J Mol |
| | charge pairs (EEE- | P228E, L368E | P228R, K409R | Biol 420: 204-19 |
| | RRR) | | | |
| Fc 7 | IgG2 hingE, CH3 | IgG2: C223E, | IgG2: C223R, | Strop et al., 2012, J Mol |
| | charge pairs (EEE- | P228E, L368E | E225R, P228R, | Biol 420: 204-19 |
| | RRRR) | | K409R | |
| Fc 8 | EW-RVT | K360E, K409W, | Q347R, D399V, | Choi et al., 2013, Mol |
| | | | F405T | Cancer Ther 12: 2748-59 |
| Fc 9 | EW-RVTS-S | K360E, K409W, | Q347R, D399V, | Choi et al., 2015, Mol |
| | | Y349C | F405T, S354C | Immunol 65: 377-83 |
| Fc 10 | Biclonic | 366K (+351K) | 351D or E or D at | Geuijen et al., 2014, |
| | | | 349, 368, 349, or | Journal of Clinical |
| | | | 349 + 355 | Oncology 32: suppl: 560 |
| Fc 11 | DuoBody (L-R) | F405L | K409R | Labrijn et al., 2013, |
| | | | | Proc Natl Acad Sci |
| | | | | USA 110: 5145-50 |
| Fc 12 | SEEDbody | IgG/A chimera | IgG/A chimera | Davis et al., 2010, |
| | | | | Protein Eng Des Sel |
| | | | | 23: 195-202 |
| Fc 13 | BEAT | residues from | residues from TCRβ | Moretti et al., 2013, |
| | | TCRα interface | interface | BMC Proceedings |
| | | | | 7(Suppl 6): O9 |
| Fc 14 | 7.8.60 (DMA-RRVV) | K360D, D399M, | E345R, Q347R, | Leaver-Fey et al., |
| | | Y407A | T366V, K409V | Structure 24: 641-51 |
| Fc 15 | 20.8.34 (SYMV- | Y349S, K370Y, | E356G, E357D, | Leaver-Fey et al., |
| | GDQA) | T366M, K409V | S364Q, Y407A | Structure 24: 641-51 |
| Fc 16 | Skew variant 12757 | None | none | FIG. 34 of US |
| | | | | 2016/0355600 |
| Fc 17 | Skew variant 12758 | L368D, K370S | S364K | FIG. 34 of US |
| | | | | 2016/0355600 |
| Fc 18 | Skew variant 12759 | L368D, K370S | S364K, E357L | FIG. 34 of US |
| | | | | 2016/0355600 |
| Fc 19 | Skew variant 12760 | L368D, K370S | S364K, E357Q | FIG. 34 of US |
| | | | | 2016/0355600 |
| Fc 20 | Skew variant 12761 | T411E, K360E, | D401K | FIG. 34 of US |
| | | Q362E | | 2016/0355600 |
| Fc 21 | Skew variant 12496 | L368E, K370S | S364K | FIG. 34 of US |
| | | | | 2016/0355600 |
| Fc 22 | Skew variant 12511 | K370S | S364K | FIG. 34 of US |
| | | | | 2016/0355600 |
| Fc 23 | Skew variant 12840 | L368E, K370S | S364K, E357Q | FIG. 34 of US |
| | | | | 2016/0355600 |
| Fc 24 | Skew variant 12841 | K370S | S364K, E357Q | FIG. 34 of US |
| | | | | 2016/0355600 |
| Fc 25 | Skew variant 12894 | L368E, K370S | S364K | FIG. 34 of US |
| | | | | 2016/0355600 |
| Fc 26 | Skew variant 12895 | K370S | S364K | FIG. 34 of US |
| | | | | 2016/0355600 |
| Fc 27 | Skew variant 12896 | L368E, K370S | S364K, E357Q | FIG. 34 of US |
| | | | | 2016/0355600 |
| Fc 28 | Skew variant 12901 | K370S | S364K, E357Q | FIG. 34 of US |
| | | | | 2016/0355600 |
| Fc 29 | pI_ISO(−) | I199T, N203D, | | FIG. 31 of US |
| | | K274Q, R355Q, | | 2016/0355600 |
| | | N384S, K392N, | | |
| | | V397M, Q419E, | | |
| | | DEL447 | | |
| Fc 30 | pI_(−)_Isosteric_A | N208D, Q295E, | | FIG. 31 of US |
| | | N384D, Q418E, | | 2016/0355600 |
| | | N421D | | |
| Fc 31 | pI_(−)_isosteric_B | N208D, Q295E, | | FIG. 31 of US |
| | | Q418E, N421D | | 2016/0355600 |
| Fc 32 | pI_ISO(+RR) | Q196K, I199T, | | FIG. 31 of US |
| | | P217R, P228R, | | 2016/0355600 |
| | | N276K | | |
| Fc 33 | pI_ISO(+) | Q196K, I199T, | | FIG. 31 of US |
| | | N276K | | 2016/0355600 |
| Fc 34 | pI_(+) isosteric_A | E269Q, E272Q, | | FIG. 31 of US |
| | | E283Q, E357Q, | | 2016/0355600 |
| Fc 35 | pI_(+)_isosteric_B | E269Q, E272Q, | | FIG. 31 of US |
| | | E283Q | | 2016/0355600 |
| Fc 36 | PI_(+) | E269Q, E272Q | | FIG. 31 of US |
| | isosteric_E269Q, | | | 2016/0355600 |
| | E272Q | | | |
| Fc 37 | pI_(+)_isosteric_E269Q, | E269Q, E283Q | | FIG. 31 of US |
| | E283Q | | | 2016/0355600 |
| Fc 38 | PI_(+) | E272Q, E283Q | | FIG. 31 of US |
| | isosteric_E2720, | | | 2016/0355600 |
| | E283Q | | | |
| Fc 39 | pI_(+)_isosteric_E269Q | E269Q | | FIG. 31 of US |
| | | | | 2016/0355600 |
| Fc 40 | Heterodimerization | F405A | T394F | FIG. 30A of US |
| | | | | 2016/0355600 |
| Fc 41 | Heterodimerization | S364D | Y349K | FIG. 30A of US |
| | | | | 2016/0355600 |
| Fc 42 | Heterodimerization | S364E | L368K | FIG. 30A of US |
| | | | | 2016/0355600 |
| Fc 43 | Heterodimerization | S364E | Y349K | FIG. 30A of US |
| | | | | 2016/0355600 |
| Fc 44 | Heterodimerization | S364F | K370G | FIG. 30A of US |
| | | | | 2016/0355600 |
| Fc 45 | Heterodimerization | S364H | Y349K | FIG. 30A of US |
| | | | | 2016/0355600 |
| Fc 46 | Heterodimerization | S364H | Y349T | FIG. 30A of US |
| | | | | 2016/0355600 |
| Fc 47 | Heterodimerization | S364Y | K370G | FIG. 30A of US |
| | | | | 2016/0355600 |
| Fc 48 | Heterodimerization | T411K | K370E | FIG. 30A of US |
| | | | | 2016/0355600 |
| Fc 49 | Heterodimerization | V397S, F405A | T394F | FIG. 30A of US |
| | | | | 2016/0355600 |
| Fc 50 | Heterodimerization | K370R, T411K | K370E, T411E | FIG. 30A of US |
| | | | | 2016/0355600 |
| Fc 51 | Heterodimerization | L351E, S364D | Y349K, L351K | FIG. 30A of US |
| | | | | 2016/0355600 |
| Fc 52 | Heterodimerization | L351E, S364E | Y349K, L351K | FIG. 30A of US |
| | | | | 2016/0355600 |
| Fc 53 | Heterodimerization | L351E, T366D | L351K, T366K | FIG. 30A of US |
| | | | | 2016/0355600 |
| Fc 54 | Heterodimerization | P395T, V397S, | T394F | FIG. 30A of US |
| | | F405A | | 2016/0355600 |
| Fc 55 | Heterodimerization | S364D, K370G | S364Y, K370R | FIG. 30A of US |
| | | | | 2016/0355600 |
| Fc 56 | Heterodimerization | S364D, T394F | Y349K, F405A | FIG. 30A of US |
| | | | | 2016/0355600 |
| Fc 57 | Heterodimerization | S364E, F405A | Y349K, T394F | FIG. 30A of US |
| | | | | 2016/0355600 |
| Fc 58 | Heterodimerization | S364E, F405S | Y349K, T394Y | FIG. 30A of US |
| | | | | 2016/0355600 |
| Fc 59 | Heterodimerization | S364E, T411E | Y349K, D401K | FIG. 30A of US |
| | | | | 2016/0355600 |
| Fc 60 | Heterodimerization | S364H, D401K | Y349T, T411E | FIG. 30A of US |
| | | | | 2016/0355600 |
| Fc 61 | Heterodimerization | S364H, F405A | Y349T, T394F | FIG. 30A of US |
| | | | | 2016/0355600 |
| Fc 62 | Heterodimerization | S364H, T394F | Y349T, F405A | FIG. 30A of US |
| | | | | 2016/0355600 |
| Fc 63 | Heterodimerization | Y349C, S364E | Y349K, S354C | FIG. 30A of US |
| | | | | 2016/0355600 |
| Fc 64 | Heterodimerization | L351E, S364D, | Y349K, L351K, | FIG. 30A of US |
| | | F405A | T394F | 2016/0355600 |
| Fc 65 | Heterodimerization | L351K, S364H, | Y349T, L351E, | FIG. 30A of US |
| | | D401K | T411E | 2016/0355600 |
| Fc 66 | Heterodimerization | S364E, T411E, | Y349K, T394F, | FIG. 30A of US |
| | | F405A | D401K | 2016/0355600 |
| Fc 67 | Heterodimerization | S364H, D401K, | Y349T, T394F, | FIG. 30A of US |
| | | F405A | T411E | 2016/0355600 |
| Fc 68 | Heterodimerization | S364H, F405A, | Y349T, T394F, | FIG. 30A of US |
| | | T411E | D401K | 2016/0355600 |
| Fc 69 | Heterodimerization | T411E, K360E, | D401K | FIG. 30C of US |
| | | N390D | | 2016/0355600 |
| Fc 70 | Heterodimerization | T411E, Q362E, | D401K | FIG. 30C of US |
| | | N390D | | 2016/0355600 |
| Fc 71 | Heterodimerization | T411E, Q347R | D401K, K360D | FIG. 30C of US |
| | | | | 2016/0355600 |
| Fc 72 | Heterodimerization | T411E, Q347R | D401K, K360E | FIG. 30C of US |
| | | | | 2016/0355600 |
| Fc 73 | Heterodimerization | T411E, K360 | D401K, Q347K | FIG. 30C of US |
| | | | | 2016/0355600 |
| Fc 74 | Heterodimerization | T411E, K360D | D401K, Q347R | FIG. 30C of US |
| | | | | 2016/0355600 |
| Fc 75 | Heterodimerization | T411E, K360E | D401K, Q347K | FIG. 30C of US |
| | | | | 2016/0355600 |
| Fc 76 | Heterodimerization | T411E, K360E | D401K, Q347R | FIG. 30C of US |
| | | | | 2016/0355600 |
| Fc 77 | Heterodimerization | T411E, S364K | D401K, K370S | FIG. 30C of US |
| | | | | 2016/0355600 |
| Fc 78 | Heterodimerization | T411E, K370S | D401K, S364K | FIG. 30C of US |
| | | | | 2016/0355600 |
| Fc 79 | Heterodimerization | Q347E | E357Q | FIG. 30C of US |
| | | | | 2016/0355600 |
| Fc 80 | Heterodimerization | Q347E | E357Q, Q362K | FIG. 30C of US |
| | | | | 2016/0355600 |
| Fc 81 | Heterodimerization | K360D, Q362E | Q347R | FIG. 30C of US |
| | | | | 2016/0355600 |
| Fc 82 | Heterodimerization | K360D, Q362E | D401K | FIG. 30C of US |
| | | | | 2016/0355600 |
| Fc 83 | Heterodimerization | K360D, Q362E | Q347R, D401K | FIG. 30C of US |
| | | | | 2016/0355600 |
| Fc 84 | Heterodimerization | K360E, Q362E | Q347R | FIG. 30C of US |
| | | | | 2016/0355600 |
| Fc 85 | Heterodimerization | K360E, Q362E | D401K | FIG. 30C of US |
| | | | | 2016/0355600 |
| Fc 86 | Heterodimerization | K360E, Q362E | Q347R, D401K | FIG. 30C of US |
| | | | | 2016/0355600 |
| Fc 87 | Heterodimerization | Q362E, N390D | D401K | FIG. 30C of US |
| | | | | 2016/0355600 |
| Fc 88 | Heterodimerization | Q347E, K360D | D401N | FIG. 30C of US |
| | | | | 2016/0355600 |
| Fc 89 | Heterodimerization | K360D | Q347R, N390K | FIG. 30C of US |
| | | | | 2016/0355600 |
| Fc 90 | Heterodimerization | K360D | N390K, D401N | FIG. 30C of US |
| | | | | 2016/0355600 |
| Fc 91 | Heterodimerization | K360E | Y349H | FIG. 30C of US |
| | | | | 2016/0355600 |
| Fc 92 | Heterodimerization | K370S, Q347E | S364K | FIG. 30C of US |
| | | | | 2016/0355600 |
| Fc 93 | Heterodimerization | K370S, E357L | S364K | FIG. 30C of US |
| | | | | 2016/0355600 |
| Fc 94 | Heterodimerization | K370S, E357Q | S364K | FIG. 30C of US |
| | | | | 2016/0355600 |
| Fc 95 | Heterodimerization | K370S, Q347E, | S364K | FIG. 30C of US |
| | | E357L | | 2016/0355600 |
| Fc 96 | Heterodimerization | K370S, Q347E, | S364K | FIG. 30C of US |
| | | E357Q | | 2016/0355600 |
| Fc 97 | Heterodimerization | L368D, K370S, | S364K | FIG. 30D of US |
| | | Q347E | | 2016/0355600 |
| Fc 98 | Heterodimerization | L368D, K370S, | S364K | FIG. 30D of US |
| | | E357L | | 2016/0355600 |
| Fc 99 | Heterodimerization | L368D, K370S, | S364K | FIG. 30D of US |
| | | E357Q | | 2016/0355600 |
| Fc 100 | Heterodimerization | L368D, K370S, | S364K | FIG. 30D of US |
| | | Q347E, E357L | | 2016/0355600 |
| Fc 101 | Heterodimerization | L368D, K370S, | S364K | FIG. 30D of US |
| | | Q347E, E357Q | | 2016/0355600 |
| Fc 102 | Heterodimerization | L368E, K370S, | S364K | FIG. 30D of US |
| | | Q347E | | 2016/0355600 |
| Fc 103 | Heterodimerization | L368E, K370S, | S364K | FIG. 30D of US |
| | | E357L | | 2016/0355600 |
| Fc 104 | Heterodimerization | L368E, K370S, | S364K | FIG. 30D of US |
| | | E357Q | | 2016/0355600 |
| Fc 105 | Heterodimerization | L368E, K370S, | S364K | FIG. 30D of US |
| | | Q347E, E357L | | 2016/0355600 |
| Fc 106 | Heterodimerization | L368E, K370S, | S364K | FIG. 30D of US |
| | | Q347E, E357Q | | 2016/0355600 |
| Fc 107 | Heterodimerization | L368D, K370T, | S364K | FIG. 30D of US |
| | | Q347E | | 2016/0355600 |
| Fc 108 | Heterodimerization | L368D, K370T, | S364K | FIG. 30D of US |
| | | E357L | | 2016/0355600 |
| Fc 109 | Heterodimerization | L368D, K370T, | S364K | FIG. 30D of US |
| | | E357Q | | 2016/0355600 |
| Fc 110 | Heterodimerization | L368D, K370T, | S364K | FIG. 30D of US |
| | | Q347E, E357L | | 2016/0355600 |
| Fc 111 | Heterodimerization | L368D, K370T, | S364K | FIG. 30D of US |
| | | Q347E, E357Q | | 2016/0355600 |
| Fc 112 | Heterodimerization | L368E, K370T, | S364K | FIG. 30D of US |
| | | Q347E | | 2016/0355600 |
| Fc 113 | Heterodimerization | L368E, K370T, | S364K | FIG. 30D of US |
| | | E357L | | 2016/0355600 |
| Fc 114 | Heterodimerization | L368E, K370T, | S364K | FIG. 30D of US |
| | | E357Q | | 2016/0355600 |
| Fc 115 | Heterodimerization | L368E, K370T, | S364K | FIG. 30D of US |
| | | Q347E, E357L | | 2016/0355600 |
| Fc 116 | Heterodimerization | L368E, K370T, | S364K | FIG. 30D of US |
| | | Q347E, E357Q | | 2016/0355600 |
| Fc 117 | Heterodimerization | T411E, Q362E | D401K, T411K | FIG. 30D of US |
| | | | | 2016/0355600 |
| Fc 118 | Heterodimerization | T411E, N390D | D401K, T411K | FIG. 30D of US |
| | | | | 2016/0355600 |
| Fc 119 | Heterodimerization | T411E, Q362E | D401R, T411R | FIG. 30D of US |
| | | | | 2016/0355600 |
| Fc 120 | Heterodimerization | T411E, N390D | D401R, T411R | FIG. 30D of US |
| | | | | 2016/0355600 |
| Fc 121 | Heterodimerization | Y407T | T366Y | FIG. 30D of US |
| | | | | 2016/0355600 |
| Fc 122 | Heterodimerization | F405A | T394W | FIG. 30D of US |
| | | | | 2016/0355600 |
| Fc 123 | Heterodimerization | T366Y, F405A | T394W, Y407T | FIG. 30D of US |
| | | | | 2016/0355600 |
| Fc 124 | Heterodimerization | T3665, L368A, | T366W | FIG. 30D of US |
| | | Y407V | | 2016/0355600 |
| Fc 125 | Heterodimerization | T366S, L368A, | T366W, S354C | FIG. 30D of US |
| | | Y407V, Y349C | | 2016/0355600 |
| Fc 126 | Heterodimerization | K392D, K409D | E356K.D399K | FIG. 30E of US |
| | | | | 2016/0355600 |
| Fc 127 | Heterodimerization | K370D, K392D, | E356K, E357K, | FIG. 30E of US |
| | | K409D | D399K | 2016/0355600 |
| Fc 128 | Heterodimerization | I199T, N203D, | Q196K, L99T, | FIG. 30E of US |
| | | K247Q, R355Q, | P217R, P228R, | 2016/0355600 |
| | | N384S, K392N, | N276K | |
| | | V397M, Q419E, | | |
| | | K447 | | |
| Fc 129 | Heterodimerization | I199T, N203D, | Q196K, L99T, | FIG. 30E of US |
| | | K247Q, R355Q, | N276K | 2016/0355600 |
| | | N384S, K392N, | | |
| | | V397M, Q419E, | | |
| | | K447 | | |
| Fc 130 | Heterodimerization | N384S, K392N, | N276K | FIG. 30E of US |
| | | V397M, Q419E | | 2016/0355600 |
| Fc 131 | Heterodimerization | D221E, P228E, | D221R, P228R, | FIG. 30E of US |
| | | L368E | K409R | 2016/0355600 |
| Fc 132 | Heterodimerization | C220E, P228E, | C220R, E224R, | FIG. 30E of US |
| | | L368E | P228R, K409R | 2016/0355600 |
| Fc 133 | Heterodimerization | F405L | K409R | FIG. 30E of US |
| | | | | 2016/0355600 |
| Fc 134 | Heterodimerization | T366I, K392M, | F405A, Y407V | FIG. 30E of US |
| | | T394W | | 2016/0355600 |
| Fc 135 | Heterodimerization | T366V, K409F | L351Y, Y407A | FIG. 30E of US |
| | | | | 2016/0355600 |
| Fc 136 | Heterodimerization | T366A, K392E, | D399R, S400R, | FIG. 30E of US |
| | | K409F, T411E | Y407A | 2016/0355600 |
| Fc 137 | Heterodimerization | L351K | L351E | FIG. 30E of US |
| | | | | 2016/0355600 |
| Fc 138 | Heterodimerization | I199T, N203D, | Q196K, L199T, | FIG. 30E of US |
| | | K247Q, R355Q, | P217R, P228R, | 2016/0355600 |
| | | Q419E, K447 | N276K | |
| Fc 139 | Heterodimerization | I199T, N203D, | Q196K, I199T, | FIG. 30E of US |
| | | K247Q, R355Q, | N276K | 2016/0355600 |
| | | Q419E, K447 | | |
| Fc 140 | Heterodimerization | I199T, N203D, | | FIG. 30E of US |
| | | K274Q, R355Q, | | 2016/0355600 |
| | | N384S, K392N, | | |
| | | V397M, Q419E | | |
| | | DEL447 | | |
| Fc 141 | Heterodimerization | N208D, Q295E | | FIG. 30E of US |
| | | N384D, Q418E | | 2016/0355600 |
| | | N421D | | |
| Fc 142 | Heterodimerization | N208D, Q295E | | FIG. 30E of US |
| | | Q418E, N421D | | 2016/0355600 |
| Fc 143 | Heterodimerization | Q196K, I199T | | FIG. 30E of US |
| | | P217R, P228R | | 2016/0355600 |
| | | N276K | | |
| Fc 144 | Heterodimerization | Q196K, I199T | | FIG. 30E of US |
| | | N276K | | 2016/0355600 |
| Fc 145 | Heterodimerization | E269Q, E272Q | | FIG. 30E of US |
| | | E283Q, E357Q | | 2016/0355600 |
| Fc 146 | Heterodimerization | E269Q, E272Q | | FIG. 30E of US |
| | | E283Q, | | 2016/0355600 |
| Fc 147 | Heterodimerization | E269Q, E272Q | | FIG. 30E of US |
| | | | | 2016/0355600 |
| Fc 148 | Heterodimerization | E269Q, E283Q | | FIG. 30E of US |
| | | | | 2016/0355600 |
| Fc 149 | Heterodimerization | E272Q, E283Q | | FIG. 30E of US |
| | | | | 2016/0355600 |
| Fc 150 | Heterodimerization | E269Q | | FIG. 30E of US |
| | | | | 2016/0355600 |

[0324] 7.4.1.5.1. Steric Variants

[0325] CD3 binding molecules (e.g., MBMs) can comprise one or more, e.g., a plurality, of modifications to one or more of the constant domains of an Fc domain, e.g., to the CH3 domains. In one example, a CD3 binding molecule (e.g., MBM) of the present disclosure comprises two polypeptides that each comprise a heavy chain constant domain of an antibody, e.g., a CH2 or CH3 domain. In an example, the two heavy chain constant domains, e.g., the CH2 or CH3 domains of the CD3 binding molecule (e.g., MBM) comprise one or more modifications that allow for a heterodimeric association between the two chains. In one aspect, the one or more modifications are disposed on CH2 domains of the two heavy chains. In one aspect, the one or more modifications are disposed on CH3 domains of at least two polypeptides of the CD3 binding molecule (e.g., MBM).

[0326] One mechanism for Fc heterodimerization is generally referred to as “knobs and holes” or “knobs-into-holes”. These terms refer to amino acid mutations that create steric influences to favor formation of Fc heterodimers over Fc homodimers, as described in, e.g., Ridgway et al., 1996, Protein Engineering 9(7):617; Atwell et al., 1997, J. Mol. Biol. 270:26; U.S. Pat. No. 8,216,805. Knob-in-hole mutations can be combined with other strategies to improve heterodimerization.

[0327] In one aspect, the one or more modifications to a first polypeptide of the CD3 binding molecule (e.g., MBM) comprising a heavy chain constant domain can create a “knob” and the one or more modifications to a second polypeptide of the CD3 binding molecule (e.g., MBM) creates a “hole,” such that heterodimerization of the polypeptide of the CD3 binding molecule (e.g., MBM) comprising a heavy chain constant domain causes the “knob” to interface (e.g., interact, e.g., a CH2 domain of a first polypeptide interacting with a CH2 domain of a second polypeptide, or a CH3 domain of a first polypeptide interacting with a CH3 domain of a second polypeptide) with the “hole.” As the term is used herein, a “knob” refers to at least one amino acid side chain which projects from the interface of a first polypeptide of the CD3 binding molecule (e.g., MBM) comprising a heavy chain constant domain and is therefore positionable in a compensatory “hole” in the interface with a second polypeptide of the CD3 binding molecule (e.g., MBM) comprising a heavy chain constant domain so as to stabilize the heteromultimer, and thereby favor heteromultimer formation over homomultimer formation, for example. The knob can exist in the original interface or can be introduced synthetically (e.g. by altering nucleic acid encoding the interface). The preferred import residues for the formation of a knob are generally naturally occurring amino acid residues and are preferably selected from arginine (R), phenylalanine (F), tyrosine (Y) and tryptophan O). Most preferred are tryptophan and tyrosine. In the preferred embodiment, the original residue for the formation of the protuberance has a small side chain volume, such as alanine, asparagine, aspartic acid, glycine, serine, threonine or valine.

[0328] A “hole” refers to at least one amino acid side chain that is recessed from the interface of a second polypeptide of the CD3 binding molecule (e.g., MBM) comprising a heavy chain constant domain and therefore accommodates a corresponding knob on the adjacent interfacing surface of a first polypeptide of the CD3 binding molecule (e.g., MBM) comprising a heavy chain constant domain. The hole can exist in the original interface or can be introduced synthetically (e.g. by altering nucleic acid encoding the interface). The preferred import residues for the formation of a hole are usually naturally occurring amino acid residues and are preferably selected from alanine (A), serine (S), threonine (T) and valine (V). Most preferred are serine, alanine or threonine. In the preferred embodiment, the original residue for the formation of the hole has a large side chain volume, such as tyrosine, arginine, phenylalanine or tryptophan.

[0329] In a preferred embodiment, a first CH3 domain is modified at residue 366, 405 or 407 to create either a “knob” or a hole” (as described above), and the second CH3 domain that heterodimerizes with the first CH3 domain is modified at: residue 407 if residue 366 is modified in the first CH3 domain, residue 394 if residue 405 is modified in the first CH3 domain, or residue 366 if residue 407 is modified in the first CH3 domain to create a “hole” or “knob” complementary to the “knob” or “hole” of the first CH3 domain.

[0330] In another preferred embodiment, a first CH3 domain is modified at residue 366, and the second CH3 domain that heterodimerizes with the first CH3 domain is modified at residues 366, 368 and/or 407, to create a “hole” or “knob” complementary to the “knob” or “hole” of the first CH3 domain. In one embodiment, the modification to the first CH3 domain introduces a tyrosine (Y) residue at position 366. In an embodiment, the modification to the first CH3 is T366Y. In one embodiment, the modification to the first CH3 domain introduces a tryptophan (W) residue at position 366. In an embodiment, the modification to the first CH3 is T366W. In some embodiments, the modification to the second CH3 domain that heterodimerizes with the first CH3 domain modified at position 366 (e.g., has a tyrosine (Y) or tryptophan (N) introduced at position 366, e.g., comprises the modification T366Y or T366W), comprises a modification at position 366, a modification at position 368 and a modification at position 407. In some embodiments, the modification at position 366 introduces a serine (S) residue, the modification at position 368 introduces an alanine (A), and the modification at position 407 introduces a valine (V). In some embodiments, the modifications comprise T366S, L368A and Y407V. In one embodiment the first CH3 domain of the multispecific molecule comprises the modification T366Y, and the second CH3 domain that heterodimerizes with the first CH3 domain comprises the modifications T366S, L368A and Y407V, or vice versa. In one embodiment the first CH3 domain of the multispecific molecule comprises the modification T366W, and the second CH3 domain that heterodimerizes with the first CH3 domain comprises the modifications T366S, L368A and Y407V, or vice versa.

[0331] Additional steric or “skew” (e.g., knob in hole) modifications are described in PCT publication no. WO2014/145806 (for example, FIG. 3, FIG. 4 and FIG. 12 of WO2014/145806), PCT publication no. WO2014/110601, and PCT publication no. WO 2016/086186, WO 2016/086189, WO 2016/086196 and WO 2016/182751 the contents of which are incorporated herein in their entireties. An example of a KIH variant comprises a first constant chain comprising a L368D and a K370S modification, paired with a second constant chain comprising a S364K and E357Q modification.

[0332] Additional knob in hole modification pairs suitable for use in any of the CD3 binding molecules (e.g., MBMs) of the present disclosure are further described in, for example, WO1996/027011, and Merchant et al., 1998, Nat. Biotechnol., 16:677-681.

[0333] In further embodiments, the CH3 domains can be additionally modified to introduce a pair of cysteine residues. Without being bound by theory, it is believed that the introduction of a pair of cysteine residues capable of forming a disulfide bond provide stability to heterodimerized CD3 binding molecules (e.g., MBMs) comprising paired CH3 domains. In some embodiments, the first CH3 domain comprises a cysteine at position 354, and the second CH3 domain that heterodimerizes with the first CH3 domain comprises a cysteine at position 349. In some embodiments, the first CH3 domain comprises a cysteine at position 354 (e.g., comprises the modification S354C) and a tyrosine (Y) at position 366 (e.g., comprises the modification T366Y), and the second CH3 domain that heterodimerizes with the first CH3 domain comprises a cysteine at position 349 (e.g., comprises the modification Y349C), a serine at position 366 (e.g., comprises the modification T366S), an alanine at position 368 (e.g., comprises the modification L368A), and a valine at position 407 (e.g., comprises the modification Y407V). In some embodiments, the first CH3 domain comprises a cysteine at position 354 (e.g., comprises the modification S354C) and a tryptophan (W) at position 366 (e.g., comprises the modification T366W), and the second CH3 domain that heterodimerizes with the first CH3 domain comprises a cysteine at position 349 (e.g., comprises the modification Y349C), a serine at position 366 (e.g., comprises the modification T366S), an alanine at position 368 (e.g., comprises the modification L368A), and a valine at position 407 (e.g., comprises the modification Y407V).

[0334] An additional mechanism that finds use in the generation of heterodimers is sometimes referred to as “electrostatic steering” as described in Gunasekaran et al., 2010, J. Biol. Chem. 285(25):19637. This is sometimes referred to herein as “charge pairs”. In this embodiment, electrostatics are used to skew the formation towards heterodimerization. As a skilled artisan will appreciate, these can also have an effect on pl, and thus on purification, and thus could in some cases also be considered pl variants. However, as these were generated to force heterodimerization and were not used as purification tools, they are classified as “steric variants”. These include, but are not limited to, D221E/P228E/L368E paired with D221R/P228R/K409R and C220E/P228E/368E paired with C220R/E224R/P228R/K409R.

[0335] Additional variants that can be combined with other variants, optionally and independently in any amount, such as pl variants outlined herein or other steric variants that are shown in FIG. 37 of US 2012/0149876.

[0336] In some embodiments, the steric variants outlined herein can be optionally and independently incorporated with any pl variant (or other variants such as Fc variants, FcRn variants) into one or both Fc regions, and can be independently and optionally included or excluded from the CD3 binding molecules.

[0337] A list of suitable skew variants is found in Table 5 showing some pairs of particular utility in many embodiments. Of particular use in many embodiments are the pairs of sets including, but not limited to, S364K/E357Q:L368D/K370S; L368D/K370S:S364K; L368E/K370S:S364K; T411T/E360E/Q362E:D401K; L368D/K370S:S364K/E357L; and K370S:S364K/E357Q. In terms of nomenclature, the pair “S364K/E357Q:L368D/K370S” means that one of the Fc regions has the double variant set S364K/E357Q and the other has the double variant set L368D/K370S.

TABLE 5
Exemplary skew variants

| Fc region 1 | Fc region 2 |
|---|---|
| F405A | T394F |
| S364D | Y349K |
| S364E | L368K |
| S364E | Y349K |
| S364F | K370G |
| S364H | Y349K |
| S364H | Y349T |
| S364Y | K370G |
| T411K | K370E |
| V397S/F405A | T394F |
| K370R/T411K | K370E/T411E |
| L351E/S364D | Y349K/L351K |
| L351E/S364E | Y349K/L351K |
| L351E/T366D | L351K/T366K |
| P395T/V397S/F405A | T394F |
| S364D/K370G | S364Y/K370R |
| S364D/T394F | Y349K/F405A |
| S364E/F405A | Y349K/T394F |
| S364E/F405S | Y349K/T394Y |
| S364E/T411E | Y349K/D401K |
| S364H/D401K | Y349T/T411E |
| S364H/F405A | Y349T/T394F |
| S364H/T394F | Y349T/F405A |
| Y349C/S364E | Y349K/S354C |
| L351E/S364D/F405A | Y349K/L351K/T394F |
| L351K/S364H/D401K | Y349T/L351E/T411E |
| S364E/T411E/F405A | Y349K/T394F/D401K |
| S364H/D401K/F405A | Y349T/T394F/T411E |
| S364H/F405A/T411E | Y349T/T394F/D401K |
| K370E/T411D | T411K |
| L368E/K409E | L368K |
| Y349T/T394F/S354C | S364H/F405A/Y349C |
| T411E | D401K |
| T411E | D401R/T411R |
| Q347E/K360E | Q347R |
| L368E | S364K |
| L368E/K370S | S364K |
| L368E/K370T | S364K |
| L368E/D401R | S364K |
| L368E/D401N | S364K |
| L368E | E357S/S364K |
| L368E | S364K/K409E |
| L368E | S364K/K409V |
| L368D | S364K |
| L368D/K370S | S364K |
| L368D/K370S | S364K/E357L |
| L368D/K370S | S364K/E357Q |
| T411E/K360E/Q362E | D401K |
| K370S | S364K |
| L368E/K370S | S364K/E357Q |
| K370S | S364K/E357Q |
| T411E/K360D | D401K |
| T411E/K360E | D401K |
| T411E/Q362E | D401K |
| T411E/N390D | D401K |
| T411E | D401K/Q347K |
| T411E | D401K/Q347R |
| T411E/K360D/Q362E | D401K |
| K392D/K409D | E356K/D399K |
| K370D/K392D/K409D | E356K/E357K/D399K |
| I199T/N203D/K247Q/R355Q/N384S/K392N/ | Q196K/1199T/P217R/ |
| V397M/Q419E/K447_{—} | P228R/N276K |
| I199T/N203D/K247Q/R355Q/N384S/K392N/ | Q196K/I199T/N276K |
| V397M/Q419E/K447_{—} | |
| N384S/K392N/V397M/Q419E | N276K |
| D221E/P228E/L368E | D221R/P228R/K409R |
| C220E/P228E/L368E | C220R/E224R/P228R/ |
| | K409R |
| F405L | K409R |
| T366I/K392M/T394W | F405A/Y407V |
| T366V/K409F | L351Y/Y407A |
| T366A/K392E/K409F/T411E | D399R/S400R/Y407A |
| L351K | L351E |
| I199T/N203D/K247Q/R355Q/Q419E/K447_{—} | Q196K/1199T/P217R/ |
| | P228R/N276K |
| I199T/N203D/K247Q/R355Q/Q419E/K447_{—} | Q196K/I199T/N276K |
| I199T N203D K274Q R355Q N384S K392N | |
| V397M Q419E DEL447 | |
| N208D Q295E N384D Q418E N421D | |
| N208D Q295E Q418E N421D | |
| Q196K I199T P217R P228R N276K | |
| Q196K I199T N276K | |
| E269Q E272Q E283Q E357Q | |
| E269Q E272Q E283Q | |
| E269Q E272Q | |
| E269Q E283Q | |
| E272Q E283Q | |
| E269Q | |
| T411E/K360E/N390D | D401K |
| T411E/Q362E/N390D | D401K |
| T411E/Q347R | D401K/K360D |
| T411E/Q347R | D401K/K360E |
| T411E/K360 | D401K/Q347K |
| T411E/K360D | D401K/Q347R |
| T411E/K360E | D401K/Q347K |
| T411E/K360E | D401K/Q347R |
| T411E/S364K | D401K/K370S |
| T411E/K370S | D401K/S364K |
| Q347E | E357Q |
| Q347E | E357Q/Q362K |
| K360D/Q362E | Q347R |
| K360D/Q362E | D401K |
| K360D/Q362E | Q347R/D401K |
| K360E/Q362E | Q347R |
| K360E/Q362E | D401K |
| K360E/Q362E | Q347R/D401K |
| Q362E/N390D | D401K |
| Q347E/K360D | D401N |
| K360D | Q347R/N390K |
| K360D | N390K/D401N |
| K360E | Y349H |
| K370S/Q347E | S364K |
| K370S/E357L | S364K |
| K370S/E357Q | S364K |
| K370S/Q347E/E357L | S364K |
| K370S/Q347E/E357Q | S364K |
| L368D/K370S/Q347E | S364K |
| L368D/K370S/E357L | S364K |
| L368D/K370S/E357Q | S364K |
| L368D/K370S/Q347E/E357L | S364K |
| L368D/K370S/Q347E/E357Q | S364K |
| L368E/K370S/Q347E | S364K |
| L368E/K370S/E357L | S364K |
| L368E/K370S/E357Q | S364K |
| L368E/K370S/Q347E/E357L | S364K |
| L368E/K370S/Q347E/E357Q | S364K |
| L368D/K370T/Q347E | S364K |
| L368D/K370T/E357L | S364K |
| L368D/K370T/E357Q | S364K |
| L368D/K370T/Q347E/E357L | S364K |
| L368D/K370T/Q347E/E357Q | S364K |
| L368E/K370T/Q347E | S364K |
| L368E/K370T/E357L | S364K |
| L368E/K370T/E357Q | S364K |
| L368E/K370T/Q347E/E357L | S364K |
| L368E/K370T/Q347E/E357Q | S364K |
| T411E/Q362E | D401K/T411K |
| T411E/N390D | D401K/T411K |
| T411E/Q362E | D401R/T411R |
| T411E/N390D | D401R/T411R |
| Y407T | T366Y |
| F405A | T394W |
| T366Y/F405A | T394W/Y407T |
| Y407A | T366W |
| T366S/L368A/Y407V | T366W |
| T366S/L368A/Y407V/Y349C | T366W/S354C |
| K392D/K409D | E356K/D399K |
| K370D/K392D/K409D | E356K/E357K/D399K |
| I199T/N203D/K247Q/R355Q/N384S/K392N/ | Q196K/I199T/P217R/ |
| V397M/Q419E/K447 | P228R/N276K |
| I199T/N203D/K247Q/R355Q/N384S/K392N/ | Q196K/I199T/N276K |
| V397M/Q419E/K447 | |
| N384S/K392N/V397M/Q419E | N276K |
| D221E/P228E/L368E | D221R/P228R/K409R |
| C220E/P228E/L368E | C220R/E224R/P228R/ |
| | K409R |
| F405L | K409R |
| T366I/K392M/T394W | F405A/Y407V |
| T366V/K409F | L351Y/Y407A |
| T366A/K392E/K409F/T411E | D399R/S400R/Y407A |
| L351K | L351E |
| I199T/N203D/K247Q/R355Q/Q419E/K447_{—} | Q196K/I199T/P217R/ |
| | P228R/N276K |
| I199T/N203D/K247Q/R355Q/Q419E/K447_{—} | Q196K/I199T/N276K |
| I199T N203D K274Q R355Q N384S K392N | |
| V397M Q419E DEL447 | |
| N208D Q295E N384D Q418E N421D | |
| Q295E N384D Q418E N421D | |
| N208D Q295E Q418E N421D | |
| Q295EQ418E N421D | |
| Q196K I199T P217R P228R N276K | |
| Q196K I199T N276K | |
| E269Q E272Q E283Q E357Q | |
| E269Q E272Q E283Q | |
| E269Q E272Q | |
| E269Q E283Q | |
| E272Q E283Q | |
| E269Q | |

[0338] In some embodiments, a CD3 binding molecule comprises a first Fc region and a second Fc region. In some embodiments, the first Fc region comprises the following mutations: L368D and K370S, and the second Fc region comprises the following mutations: S364K and E357Q. In some embodiments, the first Fc region comprises the following mutations: S364K and E357Q, and the second Fc region comprises the following mutations: L368D and K370S.

[0339] 7.4.1.5.2. Alternative Knob and Hole: IgG Heterodimerization

[0340] Heterodimerization of polypeptide chains of a CD3 binding molecule (e.g., MBM) comprising paired CH3 domains can be increased by introducing one or more modifications in a CH3 domain which is derived from the IgG1 antibody class. In an embodiment, the modifications comprise a K409R modification to one CH3 domain paired with F405L modification in the second CH3 domain. Additional modifications can also, or alternatively, be at positions 366, 368, 370, 399, 405, 407, and 409. Preferably, heterodimerization of polypeptides comprising such modifications is achieved under reducing conditions, e.g., 10-100 mM 2-MEA (e.g., 25, 50, or 100 mM 2-MEA) for 1-10, e.g., 1.5-5, e.g., 5, hours at 25-37 C, e.g., 25 C or 37 C.

[0341] The amino acid replacements described herein can be introduced into the CH3 domains using techniques which are well known in the art (see, e.g., McPherson, ed., 1991, Directed Mutagenesis: a Practical Approach; Adelman et al., 1983, DNA, 2:183).

[0342] The IgG heterodimerization strategy is further described in, for example, WO2008/119353, WO2011/131746, and WO2013/060867.

[0343] In any of the embodiments described in this Section, the CH3 domains can be additionally modified to introduce a pair of cysteine residues as described in Section 7.4.1.5.1.

[0344] 7.4.1.5.3. Pl (Isoelectric Point) Variants

[0345] In general, as will be appreciated by a skilled artisan, there are two general categories of pl variants: those that increase the pl of the protein (basic changes) and those that decrease the pl of the protein (acidic changes). As described herein, all combinations of these variants can be done: one Fc region can be wild type, or a variant that does not display a significantly different pl from wild-type, and the other can be either more basic or more acidic. Alternatively, each Fc region is changed, one to more basic and one to more acidic.

[0346] Exemplary combinations of pl variants are shown in Table 6. As outlined herein and shown in Table 6, these changes are shown relative to IgG1, but all isotypes can be altered this way, as well as isotype hybrids. In the case where the heavy chain constant domain is from IgG2-4, R133E and R133Q can also be used.

TABLE 6
Exemplary pI Variant Combinations

| Variant constant reqion | Substitutions |
|---|---|
| pI_ISO(−) | I199T N203D K274Q R355Q N384S |
| | K392N V397M Q419E DEL447 |
| pI_(−)_isosteric_A | N208D Q295E N384D Q418E |
| | N421D |
| pI_(−)_isosteric A-Fc only | Q295E N384D Q418E N421D |
| pI_(−)_isosteric_B | N208D Q295E Q418E N421D |
| pI_(−)_isosteric_B-Fc only | Q295E Q418E N421D |
| pI_ISO(+RR) | Q196K I199T P217R P228R N276K |
| pI_ISO(+) | Q196K I199T N276K |
| pI_(+)_isosteric_A | E269Q E272Q E283Q E357Q |
| pI_(+)_isosteric_B | E269Q E272Q E283Q |
| pI_(+)_isosteric_E269Q/E272Q | E269Q E272Q |
| pI_(+)_isosteric_E269Q/E283Q | E269Q E283Q |
| pI_(+)_isosteric_E272Q/E283Q | E272Q E283Q |
| pI_(+)_isosteric_E269Q | E269Q |

[0347] In one embodiment, for example in the FIG. 1B-1W, FIG. 1Y-1AH, FIG. 2B-2L, and FIG. 2N-2V formats, a combination of pl variants has one Fc region (the negative Fab side) comprising 208D/295E/384D/418E/421D variants (N208D/Q295E/N384D/Q418E/N421D when relative to human IgG1) and a second Fc region (the positive scFv side) comprising a positively charged scFv linker, e.g., L36 (described in Section 7.4.3). However, as will be appreciated by a skilled artisan, the first Fc region includes a CH1 domain, including position 208. Accordingly, in constructs that do not include a CH1 domain (for example for MBMs that do not utilize a CH1 domain as one of the domains, for example in a format depicted in FIG. 2K), a negative pl variant Fc set can include 295E/384D/418E/421D variants (Q295E/N384D/Q418E/N421D when relative to human IgG1).

[0348] In some embodiments, a first Fc region has a set of substitutions from Table 6 and a second Fc region is connected to a charged linker (e.g., selected from those described in Section 7.4.3).

[0349] In some embodiments, the CD3 binding molecule of the present disclosure comprises a first Fc region and a second Fc region. In some embodiments, the first Fc region comprises the following mutations: N208D, Q295E, N384D, Q418E, and N421D. In some embodiments, the second Fc region comprises the following mutations: N208D, Q295E, N384D, Q418E, and N421D.

[0350] 7.4.1.5.4. Isotopic Variants

[0351] In addition, many embodiments of the disclosure rely on the “importation” of pl amino acids at particular positions from one IgG isotype into another, thus reducing or eliminating the possibility of unwanted immunogenicity being introduced into the variants. A number of these are shown in FIG. 21 of US Publ. 2014/0370013. That is, IgG1 is a common isotype for therapeutic antibodies for a variety of reasons, including high effector function. However, the heavy constant region of IgG1 has a higher pl than that of IgG2 (8.10 versus 7.31). By introducing IgG2 residues at particular positions into the IgG1 backbone, the pl of the resulting Fc region is lowered (or increased) and additionally exhibits longer serum half-life. For example, IgG1 has a glycine (pl 5.97) at position 137, and IgG2 has a glutamic acid (pl 3.22); importing the glutamic acid will affect the pl of the resulting protein. As is described below, a number of amino acid substitutions are generally required to significantly affect the pl of the variant antibody. However, it should be noted as discussed below that even changes in IgG2 molecules allow for increased serum half-life.

[0352] In other embodiments, non-isotypic amino acid changes are made, either to reduce the overall charge state of the resulting protein (e.g., by changing a higher pl amino acid to a lower pl amino acid), or to allow accommodations in structure for stability, as is further described below.

[0353] In addition, by pl engineering both the heavy and light constant domains of a CD3 binding molecule comprising two half antibodies, significant changes in each half antibody can be seen. Having the pls of the two half antibodies differ by at least 0.5 can allow separation by ion exchange chromatography or isoelectric focusing, or other methods sensitive to isoelectric point.

[0354] 7.4.1.5.5. Calculating pl

[0355] The pl of a half antibody comprising an Fc region and an ABM or ABM chain can depend on the pl of the variant heavy chain constant domain and the pl of the total half antibody, including the variant heavy chain constant domain and ABM or ABM chain. Thus, in some embodiments, the change in pl is calculated on the basis of the variant heavy chain constant domain, using the chart in the FIG. 19 of US Pub. 2014/0370013. As discussed herein, which half antibody to engineer is generally decided by the inherent pl of the half antibodies. Alternatively, the pl of each half antibody can be compared.

[0356] 7.4.1.5.6. Pl Variants that Also Confer Better FcRn In Vivo Binding

[0357] In the case where a pl variant decreases the pl of an Fc region, it can have the added benefit of improving serum retention in vivo.

[0358] pl variant Fc regions are believed to provide longer half-lives to antigen binding molecules in vivo, because binding to FcRn at pH 6 in an endosome sequesters the Fc (Ghetie and Ward, 1997, Immunol Today. 18(12): 592-598). The endosomal compartment then recycles the Fc to the cell surface. Once the compartment opens to the extracellular space, the higher pH ˜7.4, induces the release of Fc back into the blood. In mice, DaII' Acqua et al. showed that Fc mutants with increased FcRn binding at pH 6 and pH 7.4 actually had reduced serum concentrations and the same half life as wild-type Fc (Dall'Acqua et al., 2002, J. Immunol. 169:5171-5180). The increased affinity of Fc for FcRn at pH 7.4 is thought to forbid the release of the Fc back into the blood. Therefore, the Fc mutations that will increase Fc's half-life in vivo will ideally increase FcRn binding at the lower pH while still allowing release of Fc at higher pH. The amino acid histidine changes its charge state in the pH range of 6.0 to 7.4. Therefore, it is not surprising to find His residues at important positions in the Fc/FcRn complex.

[0359] It has been suggested that antibodies with variable regions that have lower isoelectric points can also have longer serum half-lives (Igawa et al., 2010, PEDS. 23(5): 385-392). However, the mechanism of this is still poorly understood. Moreover, variable regions differ from antibody to antibody. Constant region variants with reduced pl and extended half-life would provide a more modular approach to improving the pharmacokinetic properties of CD3 binding molecules, as described herein.

[0360] 7.4.1.5.7. Polar Bridge

[0361] Heterodimerization of polypeptide chains of CD3 binding molecules (e.g., MBMs) comprising an Fc domain can be increased by introducing modifications based on the “polar-bridging” rationale, which is to make residues at the binding interface of the two polypeptide chains to interact with residues of similar (or complimentary) physical property in the heterodimer configuration, while with residues of different physical property in the homodimer configuration. In particular, these modifications are designed so that, in the heterodimer formation, polar residues interact with polar residues, while hydrophobic residues interact with hydrophobic residues. In contrast, in the homodimer formation, residues are modified so that polar residues interact with hydrophobic residues. The favorable interactions in the heterodimer configuration and the unfavorable interactions in the homodimer configuration work together to make it more likely for Fc regions to form heterodimers than to form homodimers.

[0362] In an exemplary embodiment, the above modifications are generated at one or more positions of residues 364, 368, 399, 405, 409, and 411 of a CH3 domain.

[0363] In some embodiments, one or more modifications selected from S364L, T366V, L368Q, N399K, F405S, K409F and R411K are introduced into one of the two CH3 domains. One or more modifications selected from Y407F, K409Q and T411N can be introduced into the second CH3 domain.

[0364] In another embodiment, one or more modifications selected from a group consisting of S364L, T366V, L368Q, D399K, F405S, K409F and T411K are introduced into one CH3 domain, while one or more modifications selected from Y407F, K409Q and T411D are introduced into the second CH3 domain.

[0365] In one exemplary embodiment, the original residue of threonine at position 366 of one CH3 domain is replaced by valine, while the original residue of tyrosine at position 407 of the other CH3 domain is replaced by phenylalanine.

[0366] In another exemplary embodiment, the original residue of serine at position 364 of one CH3 domain is replaced by leucine, while the original residue of leucine at position 368 of the same CH3 domain is replaced by glutamine.

[0367] In yet another exemplary embodiment, the original residue of phenylalanine at position 405 of one CH3 domain is replaced by serine and the original residue of lysine at position 409 of this CH3 domain is replaced by phenylalanine, while the original residue of lysine at position 409 of the other CH3 domain is replaced by glutamine.

[0368] In yet another exemplary embodiment, the original residue of aspartic acid at position 399 of one CH3 domain is replaced by lysine, and the original residue of threonine at position 411 of the same CH3 domain is replaced by lysine, while the original residue of threonine at position 411 of the other CH3 domain is replaced by aspartic acid.

[0369] The amino acid replacements described herein can be introduced into the CH3 domains using techniques which are well known in the art (see, e.g., McPherson, ed., 1991, Directed Mutagenesis: a Practical Approach; Adelman et al., 1983, DNA, 2:183). The polar bridge strategy is described in, for example, WO2006/106905, WO2009/089004 and K. Gunasekaran, et al. (2010) The Journal of Biological Chemistry, 285:19637-19646.

[0370] Additional polar bridge modifications are described in, for example, PCT publication no. WO2014/145806 (for example, FIG. 6 of WO2014/145806), PCT publication no. WO2014/110601, and PCT publication no. WO 2016/086186, WO 2016/086189, WO 2016/086196 and WO 2016/182751 the contents of which are incorporated herein in their entireties. An example of a polar bridge variant comprises a constant chain comprising a N208D, Q295E, N384D, Q418E and N421D modification.

[0371] In any of the embodiments described herein, the CH3 domains can be additionally modified to introduce a pair of cysteine residues as described in Section 7.4.1.5.1.

[0372] Additional strategies for enhancing heterodimerization are described in, for example, WO2016/105450, WO2016/086186, WO2016/086189, WO2016/086196, WO2016/141378, and WO2014/145806, and WO2014/110601. Any of said strategies can be employed in a CD3 binding molecule (e.g., MBM) described herein.

[0373] 7.4.1.5.8. Combination of Heterodimerization Variants and Other Fc Variants

[0374] As will be appreciated by a skilled artisan, all of the recited heterodimerization variants (including skew and/or pl variants) can be optionally and independently combined in any way, as long as the Fc regions of an Fc domain retain their ability to dimerize. In addition, all of these variants can be combined into any of the heterodimerization formats.

[0375] In the case of pl variants, while embodiments finding particular use are shown in the Table 6, other combinations can be generated, following the basic rule of altering the pl difference between two Fc regions in an Fc heterodimer to facilitate purification.

[0376] In addition, any of the heterodimerization variants, skew and pl, are also independently and optionally combined with Fc ablation variants, Fc variants, FcRn variants, as generally outlined herein.

[0377] In some embodiments, a particular combination of skew and pl variants that finds use in the present disclosure is T366S/L368A/Y407V:T366W (optionally including a bridging disulfide, T366S/L368A/Y407V/Y349C:T366W/S354C) with one Fc region comprising Q295E/N384D/Q418E/N481D and the other a positively charged scFv linker (when the format includes an scFv domain). As will be appreciated by a skilled artisan, the “knobs in holes” variants do not change pl, and thus can be used on either one of the Fc regions in an Fc heterodimer.

[0378] In some embodiments, first and second Fc regions that find use the present disclosure include the amino acid substitutions S364K/E357Q:L368D/K370S, where the first and/or second Fc region includes the ablation variant substitutions 233P/L234V/L235A/G236del/S267K, and the first and/or second Fc region comprises the pl variant substitutions N208D/Q295E/N384D/Q418E/N421D (pl_(−)-Lisosteric_A).

[0379] 7.4.2. Hinge Regions

[0380] The CD3 binding molecules (e.g., MBMs) can also comprise hinge regions, e.g., connecting an antigen-binding module to an Fc region. The hinge region can be a native or a modified hinge region. Hinge regions are typically found at the N-termini of Fc regions.

[0381] A native hinge region is the hinge region that would normally be found between Fab and Fc domains in a naturally occurring antibody. A modified hinge region is any hinge that differs in length and/or composition from the native hinge region. Such hinges can include hinge regions from other species, such as human, mouse, rat, rabbit, shark, pig, hamster, camel, llama or goat hinge regions. Other modified hinge regions can comprise a complete hinge region derived from an antibody of a different class or subclass from that of the heavy chain Fc region. Alternatively, the modified hinge region can comprise part of a natural hinge or a repeating unit in which each unit in the repeat is derived from a natural hinge region. In a further alternative, the natural hinge region can be altered by converting one or more cysteine or other residues into neutral residues, such as serine or alanine, or by converting suitably placed residues into cysteine residues. By such means, the number of cysteine residues in the hinge region can be increased or decreased. This approach is described further in U.S. Pat. No. 5,677,425 by Bodmer et al. Altering the number of cysteine residues in a hinge region can, for example, facilitate assembly of light and heavy chains, or increase or decrease the stability of a CD3 binding molecule. Other modified hinge regions can be entirely synthetic and can be designed to possess desired properties such as length, cysteine composition and flexibility.

[0382] A number of modified hinge regions have already been described for example, in U.S. Pat. No. 5,677,425, WO9915549, WO2005003170, WO2005003169, WO2005003170, WO9825971 and WO2005003171.

Examples of suitable hinge sequences are shown in Table 7.

TABLE 7
Hinge Sequences

| Hinge | Hinge | | SEQ ID |
|---|---|---|---|
| Name | Description | Hinge Sequence | NO: |
| H1 | Human IgA1 | VPSTPPTPSPSTPPTPSPS | SEQ ID |
| | | | NO: 1 |
| H2 | Human IgA2 | VPPPPP | SEQ ID |
| | | | NO: 2 |
| H3 | Human IgD | ESPKAQASSVPTAQPQAEGSLAKATTAPATTRN | SEQ ID |
| | | TGRGGEEKKKEKEKEEQEERETKTP | NO: 3 |
| H4 | Human IgG1 | EPKSCDKTHTCPPCP | SEQ ID |
| | | | NO: 4 |
| H5 | Human IgG2 | ERKCCVECPPCP | SEQ ID |
| | | | NO: 5 |
| H6 | Human IgG3 | ELKTPLGDTTHTCPRCPEPKSCDTPPPCPRCPE | SEQ ID |
| | | PKSCDTPPPCPRCPEPKSCDTPPPCPRCP | NO: 6 |
| H7 | Human IgG4 | ESKYGPPCPSCP | SEQ ID |
| | | | NO: 7 |
| H8 | Human IgG4(P) | ESKYGPPCPPCP | SEQ ID |
| | | | NO: 8 |
| H9 | Engineered v1 | CPPC | SEQ ID |
| | | | NO: 9 |
| H10 | Engineered v2 | CPSC | SEQ ID |
| | | | NO: 10 |
| H11 | Engineered v3 | CPRC | SEQ ID |
| | | | NO: 11 |
| H12 | Engineered v4 | SPPC | SEQ ID |
| | | | NO: 12 |
| H13 | Engineered v5 | CPPS | SEQ ID |
| | | | NO: 13 |
| H14 | Engineered v6 | SPPS | SEQ ID |
| | | | NO: 14 |
| H15 | Engineered v7 | DKTHTCAA | SEQ ID |
| | | | NO: 15 |
| H16 | Engineered v8 | DKTHTCPPCPA | SEQ ID |
| | | | NO: 16 |
| H17 | Engineered v9 | DKTHTCPPCPATCPPCPA | SEQ ID |
| | | | NO: 17 |
| H18 | Engineered v10 | DKTHTCPPCPATCPPCPATCPPCPA | SEQ ID |
| | | | NO: 18 |
| H19 | Engineered v11 | DKTHTCPPCPAGKPTLYNSLVMSDTAGTCY | SEQ ID |
| | | | NO: 19 |
| H20 | Engineered v12 | DKTHTCPPCPAGKPTHVNVSVVMAEVDGTCY | SEQ ID |
| | | | NO: 20 |
| H21 | Engineered v13 | DKTHTCCVECPPCPA | SEQ ID |
| | | | NO: 21 |
| H22 | Engineered v14 | DKTHTCPRCPEPKSCDTPPPCPRCPA | SEQ ID |
| | | | NO: 22 |
| H23 | Engineered v15 | DKTHTCPSCPA | SEQ ID |
| | | | NO: 23 |

[0383] In one embodiment, the heavy chain Fc region possesses an intact hinge region at its N-terminus.

[0384] In one embodiment the heavy chain Fc region and hinge region are derived from IgG4 and the hinge region comprises the modified sequence CPPC (SEQ ID NO: 9). The core hinge region of human IgG4 contains the sequence CPSC (SEQ ID NO: 10) compared to IgG1 which contains the sequence CPPC (SEQ ID NO: 9). The serine residue present in the IgG4 sequence leads to increased flexibility in this region, and therefore a proportion of molecules form disulfide bonds within the same protein chain (an intrachain disulfide) rather than bridging to the other heavy chain in the IgG molecule to form the interchain disulfide. (Angel et al., 1993, Mol Immunol 30(1):105-108). Changing the serine residue to a proline to give the same core sequence as IgG1 allows complete formation of inter-chain disulfides in the IgG4 hinge region, thus reducing heterogeneity in the purified product. This altered isotype is termed IgG4P.

[0385] 7.4.3. ABM Linkers

[0386] In certain aspects, the present disclosure provides CD3 binding molecules (e.g., MBMs) comprising at least three ABMs, wherein two or more components of an ABM (e.g., a VH and a VL of a scFv), two or more ABMs, or an ABM and a non-ABM domain (e.g., a dimerization domain such as an Fc region) are connected to one another by a peptide linker. Such linkers are referred to herein an “ABM linkers,” as opposed to the ADC linkers used to attach drugs to CD3 binding molecules (e.g., MBMs) as described, for example, in Section 7.13.2.

[0387] A peptide linker can range from 2 amino acids to 60 or more amino acids, and in certain aspects a peptide linker ranges from 3 amino acids to 50 amino acids, from 4 to 30 amino acids, from 5 to 25 amino acids, from 10 to 25 amino acids or from 12 to 20 amino acids. In particular embodiments, a peptide linker is 2 amino acids, 3 amino acids, 4 amino acid, 5 amino acids, 6 amino acids, 7 amino acids, 8 amino acids, 9 amino acids, 10 amino acids, 11 amino acids, 12 amino acids, 13 amino acids, 14 amino acid, 15 amino acids, 16 amino acids, 17 amino acids, 18 amino acids, 19 amino acids, 20 amino acids, 21 amino acids, 22 amino acids, 23 amino acids, 24 amino acid, 25 amino acids, 26 amino acids, 27 amino acids, 28 amino acids, 29 amino acids, 30 amino acids, 31 amino acids, 32 amino acids, 33 amino acids, 34 amino acid, 35 amino acids, 36 amino acids, 37 amino acids, 38 amino acids, 39 amino acids, 40 amino acids, 41 amino acids, 42 amino acids, 43 amino acids, 44 amino acid, 45 amino acids, 46 amino acids, 47 amino acids, 48 amino acids, 49 amino acids, or 50 amino acids in length.

[0388] Charged and/or flexible linkers are particularly preferred.

[0389] Examples of flexible ABM linkers that can be used in the CD3 binding molecules (e.g., MBMs) include those disclosed by Chen et al., 2013, Adv Drug Deliv Rev. 65(10):1357-1369 and Klein et al., 2014, Protein Engineering, Design & Selection 27(10):325-330. A particularly useful flexible linker is (GGGGS)n (SEQ ID NO:24) also referred to as (G4S)n (SEQ ID NO: 24))). In some embodiments, n is any number between 1 and 10, i.e., 1, 2, 3, 4, 5, 6, 7, 8, 9, and 10, or any range bounded by any two of the foregoing numbers, e.g., 1 to 5, 2 to 5, 3 to 6, 2 to 4, 1 to 4, and so on and so forth.

[0390] Other examples of suitable ABM linkers for use in the CD3 binding molecules (e.g., MBMs) of the present disclosure are shown in Table 8 below:

TABLE 8
ABM Linker Sequences

| Linker | | |
|---|---|---|
| Name | Linker Sequence | SEQ ID NO: |
| L1 | ADAAP | SEQ ID NO: 25 |
| L2 | ADAAPTVSIFP | SEQ ID NO: 26 |
| L3 | ADAAPTVSIFPP | SEQ ID NO: 27 |
| L4 | AKTTAP | SEQ ID NO: 28 |
| L5 | AKTTAPSVYPLAP | SEQ ID NO: 29 |
| L6 | AKTTPKLEEGEFSEARV | SEQ ID NO: 30 |
| L7 | AKTTPKLGG | SEQ ID NO: 31 |
| L8 | AKTTPP | SEQ ID NO: 32 |
| L9 | AKTTPPSVTPLAP | SEQ ID NO: 33 |
| L10 | ASTKGP | SEQ ID NO: 34 |
| L11 | ASTKGPSVFPLAP | SEQ ID NO: 35 |
| L12 | ASTKGPSVFPLAPASTKGPSVFPLAP | SEQ ID NO: 36 |
| L13 | EGKSSGSGSESKST | SEQ ID NO: 37 |
| L14 | GEGESGEGESGEGES | SEQ ID NO: 38 |
| L15 | GEGESGEGESGEGESGEGES | SEQ ID NO: 39 |
| L16 | GEGGSGEGGSGEGGS | SEQ ID NO: 40 |
| L17 | GENKVEYAPALMALS | SEQ ID NO: 41 |
| L18 | GGEGSGGEGSGGEGS | SEQ ID NO: 42 |
| L19 | GGGESGGEGSGEGGS | SEQ ID NO: 43 |
| L20 | GGGESGGGESGGGES | SEQ ID NO: 44 |
| L21 | GGGGS | SEQ ID NO: 45 |
| L22 | GGGGSGGGGS | SEQ ID NO: 46 |
| L23 | GGGGSGGGGSGGGGS | SEQ ID NO: 47 |
| L24 | GGGGSGGGGSGGGGSGGGGS | SEQ ID NO: 48 |
| L25 | GGGKSGGGKSGGGKS | SEQ ID NO: 49 |
| L26 | GGGKSGGKGSGKGGS | SEQ ID NO: 50 |
| L27 | GGKGSGGKGSGGKGS | SEQ ID NO: 51 |
| L28 | GGSGG | SEQ ID NO: 52 |
| L29 | GGSGGGGSG | SEQ ID NO: 53 |
| L30 | GGSGGGGSGGGGS | SEQ ID NO: 54 |
| L31 | GHEAAAVMQVQYPAS | SEQ ID NO: 55 |
| L32 | GKGGSGKGGSGKGGS | SEQ ID NO: 56 |
| L33 | GKGKSGKGKSGKGKS | SEQ ID NO: 57 |
| L34 | GKGKSGKGKSGKGKSGKGKS | SEQ ID NO: 58 |
| L35 | GKPGSGKPGSGKPGS | SEQ ID NO: 59 |
| L36 | GKPGSGKPGSGKPGSGKPGS | SEQ ID NO: 60 |
| L37 | GPAKELTPLKEAKVS | SEQ ID NO: 61 |
| L38 | GSAGSAAGSGEF | SEQ ID NO: 62 |
| L39 | IRPRAIGGSKPRVA | SEQ ID NO: 63 |
| L40 | KESGSVSSEQLAQFRSLD | SEQ ID NO: 64 |
| L41 | KTTPKLEEGEFSEAR | SEQ ID NO: 65 |
| L42 | QPKAAP | SEQ ID NO: 66 |
| L43 | QPKAAPSVTLFPP | SEQ ID NO: 67 |
| L44 | RADAAAA(G4S)₄ | SEQ ID NO: 68 |
| L45 | RADAAAAGGPGS | SEQ ID NO: 69 |
| L46 | RADAAP | SEQ ID NO: 70 |
| L47 | RADAAPTVS | SEQ ID NO: 71 |
| L48 | SAKTTP | SEQ ID NO: 72 |
| L49 | SAKTTPKLEEGEFSEARV | SEQ ID NO: 73 |
| L50 | SAKTTPKLGG | SEQ ID NO: 74 |
| L51 | STAGDTHLGGEDFD | SEQ ID NO: 75 |
| L52 | TVAAP | SEQ ID NO: 76 |
| L53 | TVAAPSVFIFPP | SEQ ID NO: 77 |
| L54 | TVAAPSVFIFPPTVAAPSVFIFPP | SEQ ID NO: 78 |

[0391] In various aspects, the disclosure provides a CD3 binding molecule (e.g., MBM) which comprises one or more ABM linkers. Each of the ABM linkers can be range from 2 amino acids to 60 amino acids in length, preferably 4 to 30 amino acids, from 5 to 25 amino acids, from 10 to 25 amino acids or from 12 to 20 amino acids in length, optionally selected from Table 8 above. In particular embodiments, the CD3 binding molecule (e.g., MBM) comprises two, three, four, five or six ABM linkers. The ABM linkers can be on one, two, three, four or even more polypeptide chains of the CD3 binding molecule (e.g., MBM).

### 7.5. Bispecific Binding Molecule Configurations

[0392] Exemplary BBM configurations are shown in FIG. 1. FIG. 1A shows the components of the BBM configurations shown in FIGS. 1B-1AH. The scFv, Fab, scFab, non-immunoglobulin based ABM, and Fc domains each can have the characteristics described for these components in Sections 7.3 and 7.4. The components of the BBM configurations shown in FIG. 1 can be associated with each other by any of the means described in Sections 7.3 and 7.4 (e.g., by direct bonds, ABM linkers, disulfide bonds, Fc domains with modified with knob in hole interactions, etc.). The orientations and associations of the various components shown in FIG. 1 are merely exemplary; as will be appreciated by a skilled artisan, other orientations and associations can be suitable (e.g., as described in Sections 7.3 and 7.4).

[0393] BBMs are not limited to the configurations shown in FIG. 1. Other configurations that can be used are known to those skilled in the art. See, e.g., WO 2014/145806; WO 2017/124002; Liu et al., 2017, Front Immunol. 8:38; Brinkmann & Kontermann, 2017, mAbs 9:2, 182-212; US 2016/0355600; Klein et al., 2016, MAbs 8(6):1010-20; and US 2017/0145116.

[0394] 7.5.1. Exemplary Bivalent BBMs

[0395] The BBMs can be bivalent, i.e., they have two antigen-binding domains, one or two of which binds CD3 (ABM1) and one of which binds a second target antigen (ABM2), e.g., CD2 or a TAA.

[0396] Exemplary bivalent BBM configurations are shown in FIGS. 1B-1F.

[0397] As depicted in FIGS. 1B-1D, a BBM can comprise two half antibodies, one comprising one ABM and the other comprising one ABM, the two halves paired through an Fc domain.

[0398] In the embodiment of FIG. 1B, the first (or left) half antibody comprises a Fab and an Fc region, and the second (or right) half antibody comprises a Fab and an Fc region. The first and second half antibodies are associated through the Fc regions forming an Fc domain.

[0399] In the embodiment of FIG. 1C, the first (or left) half antibody comprises a Fab and an Fc region, and the second (or right) half antibody comprises a scFv and an Fc region. The first and second half antibodies are associated through the Fc regions forming an Fc domain.

[0400] In the embodiment of FIG. 1D, the first (or left) half antibody comprises an scFv and an Fc region, and the second (or right) half antibody comprises an scFv and an Fc region. The first and second half antibodies are associated through the Fc regions forming an Fc domain.

[0401] As depicted in FIGS. 1E-1F, a bivalent BBM can comprise two ABMs attached to one Fc region of an Fc domain.

[0402] In the embodiment of FIG. 1E, the BBM comprises a Fab, a scFv and an Fc domain, where the scFv is located between the Fab and the Fc domain.

[0403] In the embodiment of FIG. 1F, (the “one-arm scFv-mAb” configuration) BBM comprises a Fab, a scFv and an Fc domain, where the Fab is located between the scFv and the Fc domain.

[0404] In the configuration shown in FIGS. 1B-1F, each of X and Y represent either ABM1 or ABM2, provided that the BBM comprises one ABM1 and one ABM2. Accordingly, the present disclosure provides a bivalent BBM as shown in any one of FIGS. 1B through 1F, where X is an ABM1 and Y is an ABM2 (this configuration of ABMs designated as “B1” for convenience). The present disclosure also provides a bivalent BBM as shown in any one of FIGS. 1B through 1F, where X is an ABM2 and Y is an ABM1 (this configuration of ABMs designated as “B2” for convenience).

[0405] 7.5.2. Exemplary Trivalent BBMs

[0406] The BBMs can be trivalent, i.e., they have three antigen-binding domains, one or two of which binds CD3 (ABM1) and one or two of which binds a second target antigen (ABM2), e.g., CD2 or a TAA.

[0407] Exemplary trivalent BBM configurations are shown in FIGS. 1G-1Z.

[0408] As depicted in FIGS. 1G-1N, 1Q-1W, 1Y-1Z a BBM can comprise two half antibodies, one comprising two ABMs and the other comprising one ABM, the two halves paired through an Fc domain.

[0409] In the embodiment of FIG. 1G, the first (or left) half antibody comprises Fab and an Fc region, and the second (or right) half antibody comprises a scFv, a Fab, and an Fc region. The first and second half antibodies are associated through the Fc regions forming an Fc domain.

[0410] In the embodiment of FIG. 1H, the first (or left) half antibody comprises a Fab and an Fc region, and the second (or right) half antibody comprises a Fab, an scFv, and an Fc region. The first and second half antibodies are associated through the Fc regions forming an Fc domain.

[0411] In the embodiment of FIG. 11, the first (or left) half antibody comprises an scFv and an Fc region, and the second (or right) half antibody comprises two Fabs and an Fc region. The first and second half antibodies are associated through the Fc regions forming an Fc domain.

[0412] In the embodiment of FIG. 1J, the first (or left) half antibody comprises two Fav and an Fc region, and the second (or right) half antibody comprises a Fab and an Fc region. The first and second half antibodies are associated through the Fc regions forming an Fc domain.

[0413] In the embodiment of FIG. 1K, the first (or left) half antibody comprises an scFv and an Fc region, and the second (or right) half antibody comprises two scFvs and an Fc region. The first and second half antibodies are associated through the Fc regions forming an Fc domain.

[0414] In the embodiment of FIG. 1L, the first (or left) half antibody comprises an scFv and an Fc region, and the second (or right) half antibody comprises an scFv, a Fab, and an Fc region. The first and second half antibodies are associated through the Fc regions forming an Fc domain.

[0415] In the embodiment of FIG. 1M, the first (or left) half antibody comprises a scFv and an Fc region, and the second (or right) half antibody comprises a Fab, a scFv and an Fc region. The first and second half antibodies are associated through the Fc regions forming an Fc domain.

[0416] In the embodiment of FIG. 1N, the first (or left) half antibody comprises a diabody-type binding domain and an Fc region, and the second (or right) half antibody comprises a Fab and an Fc region. The first and second half antibodies are associated through the Fc regions forming an Fc domain.

[0417] In the embodiment of FIG. 1Q, the first (or left) half antibody comprises a Fab and an Fc region, and the second (or right) half antibody comprises a Fab, an Fc region, and an scFv. The first and second half antibodies are associated through the Fc regions forming an Fc domain.

[0418] In the embodiment of FIG. 1R, the first (or left) half antibody comprises a scFv and an Fc region, and the second (or right) half antibody comprises a Fab, an Fc region, and an scFv. The first and second half antibodies are associated through the Fc regions forming an Fc domain.

[0419] In the embodiment of FIG. 1S, the first (or left) half antibody comprises an scFv and an Fc region, and the second (or right) half antibody comprises an scFv, an Fc region, and a second scFv. The first and second half antibodies are associated through the Fc regions forming an Fc domain.

[0420] In the embodiment of FIG. 1T, the first (or left) half antibody comprises an scFv, an Fc region, and a Fab, and the second (or right) half antibody comprises a Fab and an Fc region. The first and second half antibodies are associated through the Fc regions forming an Fc domain.

[0421] In the embodiment of FIG. 1U, the first (or left) half antibody comprises two Fab and an Fc region, and the second (or right) half antibody comprises a non-immunoglobulin based ABM and an Fc region. The first and second half antibodies are associated through the Fc regions forming an Fc domain.

[0422] In the embodiment of FIG. 1V, the first (or left) half antibody comprises a Fab, an scFv, and an Fc region, and the second (or right) half antibody comprises a non-immunoglobulin based ABM and an Fc region. The first and second half antibodies are associated through the Fc regions forming an Fc domain.

[0423] In the embodiment of FIG. 1W, the first (or left) half antibody comprises a Fab and an Fc region, and the second (or right) half antibody comprises a scFv, a non-immunoglobulin based ABM, and an Fc region. The first and second half antibodies are associated through the Fc regions forming an Fc domain.

[0424] In the embodiment of FIG. 1Y, the first (or left) half antibody comprises an scFv and an Fc region, and the second (or right) half antibody comprises a Fab, an scFv and an Fc region. The first and second half antibodies are associated through the Fc regions forming an Fc domain.

[0425] In the embodiment of FIG. 1Z, the first (or left) half antibody comprises a Fab, an Fc region, and a scFab, and the second (or right) half antibody comprises a Fab and an Fc region. The first and second half antibodies are associated through the Fc regions forming an Fc domain.

[0426] Alternatively, as depicted in FIGS. 1O and 1P, trivalent a BBM can comprise two half antibodies, each comprising one complete ABM (a Fab in FIGS. 1O and 1P) and a portion of another ABM (one a VH, the other a VL). The two half antibodies are paired through an Fc domain, whereupon the VH and the VL associate to form a complete antigen-binding Fv domain.

[0427] The BBM can be a single chain, as shown in FIG. 1X. The BBM of FIG. 1X comprises three scFv domains connected through linkers.

[0428] In the configuration shown in FIGS. 1G-1Z, each of X, Y and A represent either an ABM1 or ABM2, provided that the BBM comprises at least ABM1 and at least one ABM2. Thus, the trivalent MBMs will include one or two ABM1s and one or two ABM2s. In some embodiments, a trivalent BBM comprises two ABM1s and one ABM2. In other embodiments, a trivalent BBM comprises one ABM1 and two ABM2s.

[0429] Accordingly, in the present disclosure provides a trivalent BBM as shown in any one of FIGS. 1G through 1Z, where X is an ABM1, Y is an ABM1 and A is an ABM2 (this configuration of ABMs designated as “T1” for convenience).

[0430] The disclosure further provides a trivalent BBM as shown in any one of FIGS. 1G through 1Z, where X is an ABM1, Y is an ABM2 and A is an ABM1 (this configuration of ABMs designated as “T2” for convenience).

[0431] The disclosure further provides a trivalent BBM as shown in any one of FIGS. 1G through 1Z, where X is an ABM2, Y is an ABM1 and A is an ABM1 (this configuration of ABMs designated as “T3” for convenience).

[0432] The disclosure further provides a trivalent BBM as shown in any one of FIGS. 1G through 1Z, where X is an ABM1, Y is an ABM2 and A is an ABM2 (this configuration of ABMs designated as “T4” for convenience).

[0433] The disclosure further provides a trivalent BBM as shown in any one of FIGS. 1G through 1Z, where X is an ABM2, Y is an ABM1 and A is an ABM2 (this configuration of ABMs designated as “T5” for convenience).

[0434] The disclosure further provides a trivalent BBM as shown in any one of FIGS. 1G through 1Z, where X is an ABM2, Y is an ABM2 and A is an ABM1 (this configuration of ABMs designated as “T6” for convenience).

[0435] 7.5.3. Exemplary Tetravalent BBMs

[0436] The BBMs can be tetravalent, i.e., they have four antigen-binding domains, one, two, or three of which binds CD2 (ABM1) and one, two, or three of which binds a second target antigen (ABM2), e.g., CD2 or a TAA.

[0437] Exemplary tetravalent BBM configurations are shown in FIGS. 1AA-1AH.

[0438] As depicted in FIGS. 1AA-1AH, a tetravalent BBM can comprise two half antibodies, each comprising two complete ABMs, the two halves paired through an Fc domain.

[0439] In the embodiment of FIG. 1AA, the first (or left) half antibody comprises a Fab, an Fc region, and an scFv, and the second (or right) half antibody comprises a Fab, an Fc region, and an scFv. The first and second half antibodies are associated through the Fc regions forming an Fc domain.

[0440] In the embodiment of FIG. 1AB, the first (or left) half antibody comprises a Fab, an scFv, and an Fc region, and the second (or right) half antibody comprises a Fab, an scFv, and an Fc region. The first and second half antibodies are associated through the Fc regions forming an Fc domain.

[0441] In the embodiment of FIG. 1AC, the first (or left) half antibody comprises an scFv, a Fab, and an Fc region, and the second (or right) half antibody comprises an scFv, a Fab, and an Fc region. The first and second half antibodies are associated through the Fc regions forming an Fc domain.

[0442] In the embodiment of FIG. 1AD, the first (or left) half antibody comprises a Fab, an Fc region, and a second Fab, and the second (or right) half antibody comprises a Fab, an Fc region, and a second Fab. The first and second half antibodies are associated through the Fc regions forming an Fc domain.

[0443] In the embodiment of FIG. 1AE, the first (or left) half antibody comprises an scFv, a second scFv, and an Fc region, and the second (or right) half antibody comprises an scFv, a second scFv, and an Fc region. The first and second half antibodies are associated through the Fc regions forming an Fc domain.

[0444] In the embodiment of FIG. 1AF, the first (or left) half antibody comprises a Fab, an scFv, and an Fc region, and the second (or right) half antibody comprises a Fab, an scFv, and an Fc region. The first and second half antibodies are associated through the Fc regions forming an Fc domain.

[0445] In the embodiment of FIG. 1AG, the first (or left) half antibody comprises a Fab, an Fc region, and an scFv, and the second (or right) half antibody comprises a scFv, an Fc region, and a Fab. The first and second half antibodies are associated through the Fc regions forming an Fc domain.

[0446] In the embodiment of FIG. 1AH, the first (or left) half antibody comprises a scFv, an Fc region, and an Fab, and the second (or right) half antibody comprises a scFv, an Fc region, and a Fab. The first and second half antibodies are associated through the Fc regions forming an Fc domain.

[0447] In the configuration shown in FIGS. 1AA-1AH, each of X, Y, A, and B represent ABM1 or ABM2, although not necessarily in that order, and provided that the BBM comprises at least one ABM1 and at least one ABM2. Thus, the tetravalent ABMs will include one, two, or three ABM1s and one, two, or ABM2s. In some embodiments, a tetravalent BBM comprises three ABM1s and one ABM2. In other embodiments, a tetravalent BBM comprises two ABM1s two ABM2s. In yet other embodiments, a tetravalent BBM comprises one ABM1 and three ABM2s.

[0448] Accordingly, in the present disclosure provides a tetravalent BBM as shown in any one of FIGS. 1AA-1AH, where X is an ABM1 and each of Y, A, and B are ABM2s (this configuration of ABMs designated as “Tv 1” for convenience).

[0449] The disclosure further provides a tetravalent BBM as shown in any one of FIGS. 1AA-1AH, where Y is an ABM1 and each of X, A, and B are ABM2s (this configuration of ABMs designated as “Tv 2” for convenience).

[0450] The disclosure further provides a tetravalent BBM as shown in any one of FIGS. 1AA-1AH, where A is an ABM1 and each of X, Y, and B are ABM2s (this configuration of ABMs designated as “Tv 3” for convenience).

[0451] The disclosure further provides a tetravalent BBM as shown in any one of FIGS. 1AA-1AH, where B is an ABM1 and each of X, Y, and A are ABM2s (this configuration of ABMs designated as “Tv 4” for convenience).

[0452] The disclosure further provides a tetravalent BBM as shown in any one of FIGS. 1AA-1AH, where X and Y are both ABM1s and both of A and B are ABM2s (this configuration of ABMs designated as “Tv 5” for convenience).

[0453] The disclosure further provides a tetravalent BBM as shown in any one of FIGS. 1AA-1AH, where X and A are both ABM1s and both of Y and B are ABM2s (this configuration of ABMs designated as “Tv 6” for convenience).

[0454] The disclosure further provides a tetravalent BBM as shown in any one of FIGS. 1AA-1AH, where X and B are both ABM1s and both of Y and A are ABM2s (this configuration of ABMs designated as “Tv 7” for convenience).

[0455] The disclosure further provides a tetravalent BBM as shown in any one of FIGS. 1AA-1AH, where Y and A are both ABM1s and both of X and B are ABM2s (this configuration of ABMs designated as “Tv 8” for convenience).

[0456] The disclosure further provides a tetravalent BBM as shown in any one of FIGS. 1AA-1AH, where Y and B are both ABM1s and both of X and A are ABM2s (this configuration of ABMs designated as “Tv 9” for convenience).

[0457] The disclosure further provides a tetravalent BBM as shown in any one of FIGS. 1AA-1AH, where A and B are both ABM1s and both of X and Y are ABM2s (this configuration of ABMs designated as “Tv 10” for convenience).

[0458] The disclosure further provides a tetravalent BBM as shown in any one of FIGS. 1AA-1AH, where each of X, Y, and A is an ABM1 and B is an ABM2 (this configuration of ABMs designated as “Tv 11” for convenience).

[0459] The disclosure further provides a tetravalent BBM as shown in any one of FIGS. 1AA-1AH, where each of X, Y, and B is an ABM1 and A is an ABM2 (this configuration of ABMs designated as “Tv 12” for convenience).

[0460] The disclosure further provides a tetravalent BBM as shown in any one of FIGS. 1AA-1AH, where each of X, A, and B is an ABM1 and Y is an ABM2 (this configuration of ABMs designated as “Tv 13” for convenience).

[0461] The disclosure further provides a tetravalent BBM as shown in any one of FIGS. 1AA-1AH, where each of Y, A, and B is an ABM1 and X is an ABM2 (this configuration of ABMs designated as “Tv 14” for convenience).

### 7.6. Trispecific Binding Molecule Configurations

[0462] Exemplary TBM configurations are shown in FIG. 2. FIG. 2A shows the components of the TBM configurations shown in FIGS. 2B-1V. The scFv, Fab, non-immunoglobulin based ABM, and Fc each can have the characteristics described for these components in Sections 7.3 and 7.4. The components of the TBM configurations shown in FIG. 2 can be associated with each other by any of the means described in Sections 7.3 and 7.4 (e.g., by direct bonds, ABM linkers, disulfide bonds, Fc domains with modified with knob in hole interactions, etc.). The orientations and associations of the various components shown in FIG. 2 are merely exemplary; as will be appreciated by a skilled artisan, other orientations and associations can be suitable (e.g., as described in Sections 7.3 and 7.4).

[0463] TBMs are not limited to the configurations shown in FIG. 2. Other configurations that can be used are known to those skilled in the art. See, e.g., WO 2014/145806; WO 2017/124002; Liu et al., 2017, Front Immunol. 8:38; Brinkmann & Kontermann, 2017, mAbs 9:2, 182-212; US 2016/0355600; Klein et al., 2016, MAbs 8(6):1010-20; and US 2017/0145116.

[0464] 7.6.1. Exemplary Trivalent TBMs

[0465] The TBMs can be trivalent, i.e., they have three antigen-binding domains, one of which binds CD3, one of which binds a TAA, and one of which binds either CD2 or a second TAA.

[0466] Exemplary trivalent TBM configurations are shown in FIGS. 2B through 2P.

[0467] As depicted in FIGS. 2B-2K and 2N-2P, a TBM can comprise two half antibodies, one comprising two ABMs and the other comprising one ABM, the two halves paired through an Fc domain.

[0468] In the embodiment of FIG. 2B, the first (or left) half antibody comprises an scFv and an Fc region, and the second (or right) half antibody comprises a Fab, an scFv and an Fc region. The first and second half antibodies are associated through the Fc regions forming an Fc domain.

[0469] In the embodiment of FIG. 2C, the first (or left) half antibody comprises two Fab and an Fc region, and the second (or right) half antibody comprises a Fab and an Fc region. The first and second half antibodies are associated through the Fc regions forming an Fc domain.

[0470] In the embodiment of FIG. 2D, the first (or left) half antibody comprises a Fab, an scFv and an Fc region, and the second (or right) half antibody comprises a Fab and an Fc region. The first and second half antibodies are associated through the Fc regions forming an Fc domain.

[0471] In the embodiment of FIG. 2E, the first (or left) half antibody comprises an scFv and an Fc region, and the second (or right) half antibody comprises two Fab and an Fc region. The first and second half antibodies are associated through the Fc regions forming an Fc domain.

[0472] In the embodiment of FIG. 2F, the first (or left) half antibody comprises an scFv, an Fc region, and a Fab, and the second (or right) half antibody comprises a Fab and an Fc region. The first and second half antibodies are associated through the Fc regions forming an Fc domain.

[0473] In the embodiment of FIG. 2G, the first (or left) half antibody comprises an scFv and an Fc region, and the second (or right) half antibody comprises a Fab an Fc region, and an scFV. The first and second half antibodies are associated through the Fc regions forming an Fc domain.

[0474] In the embodiment of FIG. 2H, the first (or left) half antibody comprises two Fab and an Fc region, and the second (or right) half antibody comprises a non-immunoglobulin based ABM and an Fc region. The first and second half antibodies are associated through the Fc regions forming an Fc domain.

[0475] In the embodiment of FIG. 2I, the first (or left) half antibody comprises a Fab, an scFv, and an Fc region, and the second (or right) half antibody comprises a non-immunoglobulin based ABM and an Fc region. The first and second half antibodies are associated through the Fc regions forming an Fc domain.

[0476] In the embodiment of FIG. 2J, the first (or left) half antibody comprises a Fab and an Fc region, and the second (or right) half antibody comprises an scFv, a non-immunoglobulin based ABM and an Fc region. The first and second half antibodies are associated through the Fc regions forming an Fc domain.

[0477] In the embodiment of FIG. 2K, the first (or left) half antibody comprises an scFv and an Fc region, and the second (or right) half antibody comprises an scFv, an Fc region, and a second scFv. The first and second half antibodies are associated through the Fc regions forming an Fc domain.

[0478] In the embodiment of FIG. 2N, the first (or left) half antibody comprises a Fab, an Fc region, and an scFv, and the second (or right) half antibody comprises a Fab, and an Fc region. The first and second half antibodies are associated through the Fc regions forming an Fc domain.

[0479] In the embodiment of FIG. 2O, the first (or left) half antibody comprises a Fab, an Fc region, and a scFab, and the second (or right) half antibody comprises a Fab and an Fc region. The first and second half antibodies are associated through the Fc regions forming an Fc domain.

[0480] In the embodiment of FIG. 2P, the first (or left) half antibody comprises a Fab, a non-immunoglobulin based ABM, and an Fc region, and the second (or right) half antibody comprises a scFv and an Fc region. The first and second half antibodies are associated through the Fc regions forming an Fc domain.

[0481] Alternatively, as depicted in FIG. 2L, trivalent a TBM can comprise two half antibodies, each comprising one complete ABM and a portion of another ABM (one a VH, the other a VL). The two half antibodies are paired through an Fc domain, whereupon the VH and the VL associate to form a complete antigen-binding Fv domain.

[0482] The TBM can be a single chain, as shown in FIG. 2M. The TBM of FIG. 2M comprises three scFv domains connected through linkers.

[0483] In each of the configurations shown in FIGS. 2B-2P, each of the domains designated X, Y, and Z represents an ABM1, ABM2, or ABM3, although not necessarily in that order. In other words, X can be ABM1, ABM2, or ABM3, Y can be ABM1, ABM2, or ABM3, and Z can be ABM1, ABM2, or ABM3, provided that the TBM comprises one ABM1, one ABM2, and one ABM3.

[0484] Accordingly, in the present disclosure provides a trivalent TBM as shown in any one of FIGS. 2B through 2P, where X is an ABM1, Y is an ABM3 and Z is an ABM2 (this configuration of ABMs designated as “T1” for convenience).

[0485] The present disclosure also provides a trivalent TBM as shown in any one of FIGS. 2B through 2P, where X is an ABM1, Y is an ABM2, and Z is an ABM3 (this configuration of ABMs designated as “T2” for convenience).

[0486] The present disclosure further provides a trivalent TBM as shown in any one of FIGS. 2B through 2P, where X is an ABM3, Y is an ABM1, and Z is an ABM2 (this configuration of ABMs designated as “T3” for convenience).

[0487] The present disclosure yet further provides a trivalent TBM as shown in any one of FIGS. 2B through 2P, where X is an ABM3, Y is an ABM2, and Z is an ABM1 (this configuration of ABMs designated as “T4” for convenience).

[0488] The present disclosure yet further provides a trivalent TBM as shown in any one of FIGS. 2B through 2P, where X is an ABM2, Y is an ABM1, and Z is an ABM3 (this configuration of ABMs designated as “T5” for convenience).

[0489] The present disclosure yet further provides a trivalent TBM as shown in any one of FIGS. 2B through 2P, where X is an ABM2, Y is an ABM3, and Z is an ABM1 (this configuration of ABMs designated as “T6” for convenience).

[0490] 7.6.2. Exemplary Tetravalent TBMs

[0491] The TBMs can be tetravalent, i.e., they have four antigen-binding domains, one or two of which binds CD3, one or two of which binds a TAA, and one or two of which binds CD2 or a second TAA.

[0492] Exemplary tetravalent TBM configurations are shown in FIGS. 2Q-2S.

[0493] As depicted in FIGS. 2Q-2S, a tetravalent TBM can comprise two half antibodies, each comprising two complete ABMs, the two halves paired through an Fc domain.

[0494] In the embodiment of FIG. 2Q, the first (or left) half antibody comprises a Fab, an Fc region, and a second Fab, and the second (or right) half antibody comprises a Fab, an Fc region, and a second Fab. The first and second half antibodies are associated through the Fc regions forming an Fc domain.

[0495] In the embodiment of FIG. 2R, the first (or left) half antibody comprises a Fab, an Fc region, and an scFv, and the second (or right) half antibody comprises a Fab, an Fc region, and an scFv. The first and second half antibodies are associated through the Fc regions forming an Fc domain.

[0496] In the embodiment of FIG. 2S, the first (or left) half antibody comprises a Fab, an Fc region, and an scFv, and the second (or right) half antibody comprises an scFv, an Fc region, and a Fab. The first and second half antibodies are associated through the Fc regions forming an Fc domain.

[0497] In the configuration shown in FIGS. 2Q-2S, each of X, Y, Z, and A represent an ABM1, an ABM2, or an ABM3, although not necessarily in that order, and provided that the TBM comprises at least one ABM1, at least one ABM2, and at least one ABM3. Thus, the tetravalent ABMs will include two ABMs against one of CD3, a TAA, and CD2 or a second TAA. In some cases, a tetravalent TBM has two CD3 ABMs.

[0498] Accordingly, the present disclosure provides tetravalent TBMs as shown in any one of FIGS. 2Q-2S, where X, Y, Z, and A are ABMs directed to CD3, a TAA and CD2 or a second TAA, as shown in Table 9.

TABLE 9
ABM Permutations in Tetravalent TBMs

| Tetravalent Configuration | X | Y | Z | A |
|---|---|---|---|---|
| Tv 1 | CD3 | CD3 | CD2 or TAA2 | TAA1 |
| Tv 2 | CD3 | CD3 | TAA1 | CD2 or TAA2 |
| Tv 3 | CD3 | CD2 or TAA2 | CD3 | TAA1 |
| Tv 4 | CD3 | TAA1 | CD3 | CD2 or TAA2 |
| Tv 5 | CD3 | CD2 or TAA2 | TAA1 | CD3 |
| Tv 6 | CD3 | TAA1 | CD2 or TAA2 | CD3 |
| Tv 7 | CD2 or TAA2 | CD3 | CD3 | TAA1 |
| Tv 8 | TAA1 | CD3 | CD3 | CD2 or TAA2 |
| Tv 9 | CD2 or TAA2 | CD3 | TAA1 | CD3 |
| Tv 10 | TAA1 | CD3 | CD2 or TAA2 | CD3 |
| Tv 11 | CD2 or TAA2 | TAA1 | CD3 | CD3 |
| Tv 12 | TAA1 | CD2 or TAA2 | CD3 | CD3 |
| Tv 13 | CD3 | CD2 or TAA2 | TAA1 | TAA1 |
| Tv 14 | CD3 | TAA1 | CD2 or TAA2 | TAA1 |
| Tv 15 | CD3 | TAA1 | TAA1 | CD2 or TAA2 |
| Tv 16 | CD2 or TAA2 | CD3 | TAA1 | TAA1 |
| Tv 17 | TAA1 | CD3 | CD2 or TAA2 | TAA1 |
| Tv 18 | TAA1 | CD3 | TAA1 | CD2 or TAA2 |
| Tv 19 | CD2 or TAA2 | TAA1 | CD3 | TAA1 |
| Tv 20 | TAA1 | CD2 or TAA2 | CD3 | TAA1 |
| Tv 21 | TAA1 | TAA1 | CD3 | CD2 or TAA2 |
| Tv 22 | CD2 or TAA2 | TAA1 | TAA1 | CD3 |
| Tv 23 | TAA1 | CD2 or TAA2 | TAA1 | CD3 |
| Tv 24 | TAA1 | TAA1 | CD2 or TAA2 | CD3 |

[0499] 7.6.3. Exemplary Pentavalent TBMs

[0500] The TBMs can be pentavalent, i.e., they have five antigen-binding domains, one, two, or three of which binds CD3, one, two, or three of which binds a TAA, and one, two, or three of which binds CD2 or a second TAA.

[0501] An exemplary pentavalent TBM configuration is shown in FIG. 2T.

[0502] As depicted in FIG. 2T, a pentavalent TBM can comprise two half antibodies, one of which comprises two complete ABMs and the other of which comprises one complete ABM, the two halves paired through an Fc domain.

[0503] In the embodiment of FIG. 2T, the first (or left) half antibody comprises a Fab, an scFv, and an Fc region, and the second (or right) half antibody comprises a Fab, an Fc region, and an scFv. The first and second half antibodies are associated through the Fc regions forming an Fc domain.

[0504] In the configuration shown in FIG. 2T, each of X, Y, Z, A, and B represent an ABM1, an ABM2, or an ABM3, although not necessarily in that order, and provided that the TBM comprises at least one ABM1, one ABM2, and one ABM3. Thus, the pentavalent TBMs can include two ABMs against two of CD3, a TAA, and CD2 or a second TAA, or three ABMs against one of CD3, a TAA, and CD2 or a second TAA. In some cases, a pentavalent TBM has two or three CD3 ABMs. In some embodiments, a pentavalent TBM has three ABM1s, one ABM2 and one ABM3.

[0505] Accordingly, the present disclosure provides a pentavalent TBM as shown in FIG. 2T, where X, Y, Z, A, and B are ABMs directed to CD3, a TAA, and CD2 or a second TAA as shown in Table 10.

TABLE 10
ABM Permutations in Pentavalent TBMs

| Pentavalent | | | | | |
|---|---|---|---|---|---|
| Configuration | X | Y | Z | A | B |
| Pv 1 | CD3 | CD3 | CD3 | CD2 or TAA2 | TAA1 |
| Pv 2 | CD3 | CD3 | CD3 | TAA1 | CD2 or TAA2 |
| Pv 3 | CD3 | CD3 | CD2 or TAA2 | CD3 | TAA1 |
| Pv 4 | CD3 | CD3 | TAA1 | CD3 | CD2 or TAA2 |
| Pv 5 | CD3 | CD3 | CD2 or TAA2 | TAA1 | CD3 |
| Pv 6 | CD3 | CD3 | TAA1 | CD2 or TAA2 | CD3 |
| Pv 7 | CD3 | CD2 or TAA2 | CD3 | CD3 | TAA1 |
| Pv 8 | CD3 | TAA1 | CD3 | CD3 | CD2 or TAA2 |
| Pv 9 | CD3 | CD2 or TAA2 | CD3 | TAA1 | CD3 |
| Pv 10 | CD3 | TAA1 | CD3 | CD2 or TAA2 | CD3 |
| Pv 11 | CD3 | CD2 or TAA2 | TAA1 | CD3 | CD3 |
| Pv 12 | CD3 | TAA1 | CD2 or TAA2 | CD3 | CD3 |
| Pv 13 | CD2 or TAA2 | CD3 | CD3 | CD3 | TAA1 |
| Pv 14 | TAA1 | CD3 | CD3 | CD3 | CD2 or TAA2 |
| Pv 15 | CD2 or TAA2 | CD3 | CD3 | TAA1 | CD3 |
| Pv 16 | TAA1 | CD3 | CD3 | CD2 or TAA2 | CD3 |
| Pv 17 | CD2 or TAA2 | CD3 | TAA1 | CD3 | CD3 |
| Pv 18 | TAA1 | CD3 | CD2 or TAA2 | CD3 | CD3 |
| Pv 19 | CD2 or TAA2 | TAA1 | CD3 | CD3 | CD3 |
| Pv 20 | TAA1 | CD2 or TAA2 | CD3 | CD3 | CD3 |
| Pv 21 | CD3 | CD3 | CD2 or TAA2 | CD2 or TAA2 | TAA1 |
| Pv 22 | CD3 | CD3 | CD2 or TAA2 | TAA1 | CD2 or TAA2 |
| Pv 23 | CD3 | CD3 | TAA1 | CD2 or TAA2 | CD2 or TAA2 |
| Pv 24 | CD3 | CD2 or TAA2 | CD3 | CD2 or TAA2 | TAA1 |
| Pv 25 | CD3 | CD2 or TAA2 | CD3 | TAA1 | CD2 or TAA2 |
| Pv 26 | CD3 | TAA1 | CD3 | CD2 or TAA2 | CD2 or TAA2 |
| Pv 27 | CD3 | CD2 or TAA2 | CD2 or TAA2 | CD3 | TAA1 |
| Pv 28 | CD3 | CD2 or TAA2 | TAA1 | CD3 | CD2 or TAA2 |
| Pv 29 | CD3 | TAA1 | CD2 or TAA2 | CD3 | CD2 or TAA2 |
| Pv 30 | CD3 | CD2 or TAA2 | CD2 or TAA2 | TAA1 | CD3 |
| Pv 31 | CD3 | CD2 or TAA2 | TAA1 | CD2 or TAA2 | CD3 |
| Pv 32 | CD3 | TAA1 | CD2 or TAA2 | CD2 or TAA2 | CD3 |
| Pv 33 | CD2 or TAA2 | CD3 | CD3 | CD2 or TAA2 | TAA1 |
| Pv 34 | CD2 or TAA2 | CD3 | CD3 | TAA1 | CD2 or TAA2 |
| Pv 35 | TAA1 | CD3 | CD3 | CD2 or TAA2 | CD2 or TAA2 |
| Pv 36 | CD2 or TAA2 | CD3 | CD2 or TAA2 | CD3 | TAA1 |
| Pv 37 | CD2 or TAA2 | CD3 | TAA1 | CD3 | CD2 or TAA2 |
| Pv 38 | TAA1 | CD3 | CD2 or TAA2 | CD3 | CD2 or TAA2 |
| Pv 39 | CD2 or TAA2 | CD3 | CD2 or TAA2 | TAA1 | CD3 |
| Pv 40 | CD2 or TAA2 | CD3 | TAA1 | CD2 or TAA2 | CD3 |
| Pv 41 | TAA1 | CD3 | CD2 or TAA2 | CD2 or TAA2 | CD3 |
| Pv 42 | CD2 or TAA2 | CD2 or TAA2 | CD3 | CD3 | TAA1 |
| Pv 43 | CD2 or TAA2 | TAA1 | CD3 | CD3 | CD2 or TAA2 |
| Pv 44 | TAA1 | CD2 or TAA2 | CD3 | CD3 | CD2 or TAA2 |
| Pv 45 | CD2 or TAA2 | CD2 or TAA2 | CD3 | TAA1 | CD3 |
| Pv 46 | CD2 or TAA2 | TAA1 | CD3 | CD2 or TAA2 | CD3 |
| Pv 47 | TAA1 | CD2 or TAA2 | CD3 | CD2 or TAA2 | CD3 |
| Pv 48 | CD2 or TAA2 | CD2 or TAA2 | TAA1 | CD3 | CD3 |
| Pv 49 | CD2 or TAA2 | TAA1 | CD2 or TAA2 | CD3 | CD3 |
| Pv 50 | TAA1 | CD2 or TAA2 | CD2 or TAA2 | CD3 | CD3 |
| Pv 51 | CD3 | CD3 | CD2 or TAA2 | TAA1 | TAA1 |
| Pv 52 | CD3 | CD3 | TAA1 | CD2 or TAA2 | TAA1 |
| Pv 53 | CD3 | CD3 | TAA1 | TAA1 | CD2 or TAA2 |
| Pv 54 | CD3 | CD2 or TAA2 | CD3 | TAA1 | TAA1 |
| Pv 55 | CD3 | TAA1 | CD3 | CD2 or TAA2 | TAA1 |
| Pv 56 | CD3 | TAA1 | CD3 | TAA1 | CD2 or TAA2 |
| Pv 57 | CD3 | CD2 or TAA2 | TAA1 | CD3 | TAA1 |
| Pv 58 | CD3 | TAA1 | CD2 or TAA2 | CD3 | TAA1 |
| Pv 59 | CD3 | TAA1 | TAA1 | CD3 | CD2 or TAA2 |
| Pv 60 | CD3 | CD2 or TAA2 | TAA1 | TAA1 | CD3 |
| Pv 61 | CD3 | TAA1 | CD2 or TAA2 | TAA1 | CD3 |
| Pv 62 | CD3 | TAA1 | TAA1 | CD2 or TAA2 | CD3 |
| Pv 63 | CD2 or TAA2 | CD3 | CD3 | TAA1 | TAA1 |
| Pv 64 | TAA1 | CD3 | CD3 | CD2 or TAA2 | TAA1 |
| Pv 65 | TAA1 | CD3 | CD3 | TAA1 | CD2 or TAA2 |
| Pv 66 | CD2 or TAA2 | CD3 | TAA1 | CD3 | TAA1 |
| Pv 67 | TAA1 | CD3 | CD2 or TAA2 | CD3 | TAA1 |
| Pv 68 | TAA1 | CD3 | TAA1 | CD3 | CD2 or TAA2 |
| Pv 69 | CD2 or TAA2 | CD3 | TAA1 | TAA1 | CD3 |
| Pv 70 | TAA1 | CD3 | CD2 or TAA2 | TAA1 | CD3 |
| Pv 71 | TAA1 | CD3 | TAA1 | CD2 or TAA2 | CD3 |
| Pv 72 | CD2 or TAA2 | TAA1 | CD3 | CD3 | TAA1 |
| Pv 73 | TAA1 | CD2 or TAA2 | CD3 | CD3 | TAA1 |
| Pv 74 | TAA1 | TAA1 | CD3 | CD3 | CD2 or TAA2 |
| Pv 75 | CD2 or TAA2 | TAA1 | CD3 | TAA1 | CD3 |
| Pv 76 | TAA1 | CD2 or TAA2 | CD3 | TAA1 | CD3 |
| Pv 77 | TAA1 | TAA1 | CD3 | CD2 or TAA2 | CD3 |
| Pv 78 | CD2 or TAA2 | TAA1 | TAA1 | CD3 | CD3 |
| Pv 79 | TAA1 | CD2 or TAA2 | TAA1 | CD3 | CD3 |
| Pv 80 | TAA1 | TAA1 | CD2 or TAA2 | CD3 | CD3 |
| Pv 81 | CD3 | CD2 or TAA2 | TAA1 | TAA1 | TAA1 |
| Pv 82 | CD3 | TAA1 | CD2 or TAA2 | TAA1 | TAA1 |
| Pv 83 | CD3 | TAA1 | TAA1 | CD2 or TAA2 | TAA1 |
| Pv 84 | CD3 | TAA1 | TAA1 | TAA1 | CD2 or TAA2 |
| Pv 85 | CD2 or TAA2 | CD3 | TAA1 | TAA1 | TAA1 |
| Pv 86 | TAA1 | CD3 | CD2 or TAA2 | TAA1 | TAA1 |
| Pv 87 | TAA1 | CD3 | TAA1 | CD2 or TAA2 | TAA1 |
| Pv 88 | TAA1 | CD3 | TAA1 | TAA1 | CD2 or TAA2 |
| Pv 89 | CD2 or TAA2 | TAA1 | CD3 | TAA1 | TAA1 |
| Pv 90 | TAA1 | CD2 or TAA2 | CD3 | TAA1 | TAA1 |
| Pv 91 | TAA1 | TAA1 | CD3 | CD2 or TAA2 | TAA1 |
| Pv 92 | TAA1 | TAA1 | CD3 | TAA1 | CD2 or TAA2 |
| Pv 93 | CD2 or TAA2 | TAA1 | TAA1 | CD3 | TAA1 |
| Pv 94 | TAA1 | CD2 or TAA2 | TAA1 | CD3 | TAA1 |
| Pv 95 | TAA1 | TAA1 | CD2 or TAA2 | CD3 | TAA1 |
| Pv 96 | TAA1 | TAA1 | TAA1 | CD3 | CD2 or TAA2 |
| Pv 97 | CD2 or TAA2 | TAA1 | TAA1 | TAA1 | CD3 |
| Pv 98 | TAA1 | CD2 or TAA2 | TAA1 | TAA1 | CD3 |
| Pv 99 | TAA1 | TAA1 | CD2 or TAA2 | TAA1 | CD3 |
| Pv 100 | TAA1 | TAA1 | TAA1 | CD2 or TAA2 | CD3 |

[0506] 7.6.4. Exemplary Hexavalent TBMs

[0507] The TBMs can be hexavalent, i.e., they have six antigen-binding domains, one, two, three, or four of which binds CD3, one, two, three, or four of which binds a TAA, and one, two, three, or four of which binds CD2 or a second TAA.

[0508] Exemplary hexavalent TBM configurations are shown in FIGS. 2U-2V.

[0509] As depicted in FIGS. 2U-2V, a pentavalent TBM can comprise two half antibodies, one of which comprises two complete ABMs and the other of which comprises one complete ABM, the two halves paired through an Fc domain.

[0510] In the embodiment of FIG. 2U, the first (or left) half antibody comprises a Fab, a second Fab, an Fc region, and an scFv, and the second (or right) half antibody comprises a Fab, a second Fab, an Fc region, and an scFv. The first and second half antibodies are associated through the Fc regions forming an Fc domain.

[0511] In the embodiment of FIG. 2V, the first (or left) half antibody comprises a first Fv, a second Fv, a third Fv, and an Fc region, and the second (or right) half antibody comprises a first Fv, a second Fv, a third Fv, and an Fc region. The first and second half antibodies are associated through the Fc regions forming an Fc domain.

[0512] In the configuration shown in FIGS. 2U-2V, each of X, Y, Z, A, B, and C represent an ABM1, an ABM2, or an ABM3, although not necessarily in that order, and provided that the TBM comprises at least one ABM1, one ABM2, and one ABM3. Thus, the hexavalent TBMs can include (i) two ABMs against each of CD3, a TAA, and CD2 or a second TAA, (ii) three ABMs against one of CD3, a TAA, and CD2 or a second TAA, or (iii) four ABMs against one of CD3, a TAA, and CD2 or a second TAA. For example, a hexavalent ABM can include three ABMs against CD3, two ABMs against a TAA and one ABM against CD2 or a second TAA. As another example, a hexavalent ABM can include three ABMs against CD3, one ABM against a TAA and two ABMs against CD2 or a second TAA. In some cases, a hexavalent TBM has two, three, our four CD3 ABMs. In some embodiments, a hexavalent TBM has three CD3 ABMs. In other embodiments, a hexavalent TBM has four CD3 ABMs.

[0513] Accordingly, in the present disclosure provides hexavalent TBMs as shown in any one of FIGS. 2U-2V, where X, Y, Z, A, B, and C are ABMs directed to CD3, a TAA, and CD2 or a second TAA, as shown in Table 11.

TABLE 11
ABM Permutations in Hexavalent TBMs

| Hexavalent | | | | | | |
|---|---|---|---|---|---|---|
| Configuration | X | Y | Z | A | B | C |
| Hv 1 | CD3 | CD3 | CD3 | CD3 | CD2 or TAA2 | TAA1 |
| Hv 2 | CD3 | CD3 | CD3 | CD3 | TAA1 | CD2 or TAA2 |
| Hv 3 | CD3 | CD3 | CD3 | CD2 or TAA2 | CD3 | TAA1 |
| Hv 4 | CD3 | CD3 | CD3 | TAA1 | CD3 | CD2 or TAA2 |
| Hv 5 | CD3 | CD3 | CD3 | CD2 or TAA2 | TAA1 | CD3 |
| Hv 6 | CD3 | CD3 | CD3 | TAA1 | CD2 or TAA2 | CD3 |
| Hv 7 | CD3 | CD3 | CD2 or TAA2 | CD3 | CD3 | TAA1 |
| Hv 8 | CD3 | CD3 | TAA1 | CD3 | CD3 | CD2 or TAA2 |
| Hv 9 | CD3 | CD3 | CD2 or TAA2 | CD3 | TAA1 | CD3 |
| Hv 10 | CD3 | CD3 | TAA1 | CD3 | CD2 or TAA2 | CD3 |
| Hv 11 | CD3 | CD3 | CD2 or TAA2 | TAA1 | CD3 | CD3 |
| Hv 12 | CD3 | CD3 | TAA1 | CD2 or TAA2 | CD3 | CD3 |
| Hv 13 | CD3 | CD2 or TAA2 | CD3 | CD3 | CD3 | TAA1 |
| Hv 14 | CD3 | TAA1 | CD3 | CD3 | CD3 | CD2 or TAA2 |
| Hv 15 | CD3 | CD2 or TAA2 | CD3 | CD3 | TAA1 | CD3 |
| Hv 16 | CD3 | TAA1 | CD3 | CD3 | CD2 or TAA2 | CD3 |
| Hv 17 | CD3 | CD2 or TAA2 | CD3 | TAA1 | CD3 | CD3 |
| Hv 18 | CD3 | TAA1 | CD3 | CD2 or TAA2 | CD3 | CD3 |
| Hv 19 | CD3 | CD2 or TAA2 | TAA1 | CD3 | CD3 | CD3 |
| Hv 20 | CD3 | TAA1 | CD2 or TAA2 | CD3 | CD3 | CD3 |
| Hv 21 | CD2 or TAA2 | CD3 | CD3 | CD3 | CD3 | TAA1 |
| Hv 22 | TAA1 | CD3 | CD3 | CD3 | CD3 | CD2 or TAA2 |
| Hv 23 | CD2 or TAA2 | CD3 | CD3 | CD3 | TAA1 | CD3 |
| Hv 24 | TAA1 | CD3 | CD3 | CD3 | CD2 or TAA2 | CD3 |
| Hv 25 | CD2 or TAA2 | CD3 | CD3 | TAA1 | CD3 | CD3 |
| Hv 26 | TAA1 | CD3 | CD3 | CD2 or TAA2 | CD3 | CD3 |
| Hv 27 | CD2 or TAA2 | CD3 | TAA1 | CD3 | CD3 | CD3 |
| Hv 28 | TAA1 | CD3 | CD2 or TAA2 | CD3 | CD3 | CD3 |
| Hv 29 | CD2 or TAA2 | TAA1 | CD3 | CD3 | CD3 | CD3 |
| Hv 30 | TAA1 | CD2 or TAA2 | CD3 | CD3 | CD3 | CD3 |
| Hv 31 | CD3 | CD3 | CD3 | CD2 or TAA2 | CD2 or TAA2 | TAA1 |
| Hv 32 | CD3 | CD3 | CD3 | CD2 or TAA2 | TAA1 | CD2 or TAA2 |
| Hv 33 | CD3 | CD3 | CD3 | TAA1 | CD2 or TAA2 | CD2 or TAA2 |
| Hv 34 | CD3 | CD3 | CD2 or TAA2 | CD3 | CD2 or TAA2 | TAA1 |
| Hv 35 | CD3 | CD3 | CD2 or TAA2 | CD3 | TAA1 | CD2 or TAA2 |
| Hv 36 | CD3 | CD3 | TAA1 | CD3 | CD2 or TAA2 | CD2 or TAA2 |
| Hv 37 | CD3 | CD3 | CD2 or TAA2 | CD2 or TAA2 | CD3 | TAA1 |
| Hv 38 | CD3 | CD3 | CD2 or TAA2 | TAA1 | CD3 | CD2 or TAA2 |
| Hv 39 | CD3 | CD3 | TAA1 | CD2 or TAA2 | CD3 | CD2 or TAA2 |
| Hv 40 | CD3 | CD3 | CD2 or TAA2 | CD2 or TAA2 | TAA1 | CD3 |
| Hv 41 | CD3 | CD3 | CD2 or TAA2 | TAA1 | CD2 or TAA2 | CD3 |
| Hv 42 | CD3 | CD3 | TAA1 | CD2 or TAA2 | CD2 or TAA2 | CD3 |
| Hv 43 | CD3 | CD2 or TAA2 | CD3 | CD3 | CD2 or TAA2 | TAA1 |
| Hv 44 | CD3 | CD2 or TAA2 | CD3 | CD3 | TAA1 | CD2 or TAA2 |
| Hv 45 | CD3 | TAA1 | CD3 | CD3 | CD2 or TAA2 | CD2 or TAA2 |
| Hv 46 | CD3 | CD2 or TAA2 | CD3 | CD2 or TAA2 | CD3 | TAA1 |
| Hv 47 | CD3 | CD2 or TAA2 | CD3 | TAA1 | CD3 | CD2 or TAA2 |
| Hv 48 | CD3 | TAA1 | CD3 | CD2 or TAA2 | CD3 | CD2 or TAA2 |
| Hv 49 | CD3 | CD2 or TAA2 | CD3 | CD2 or TAA2 | TAA1 | CD3 |
| Hv 50 | CD3 | CD2 or TAA2 | CD3 | TAA1 | CD2 or TAA2 | CD3 |
| Hv 51 | CD3 | TAA1 | CD3 | CD2 or TAA2 | CD2 or TAA2 | CD3 |
| Hv 52 | CD3 | CD2 or TAA2 | CD2 or TAA2 | CD3 | CD3 | TAA1 |
| Hv 53 | CD3 | CD2 or TAA2 | TAA1 | CD3 | CD3 | CD2 or TAA2 |
| Hv 54 | CD3 | TAA1 | CD2 or TAA2 | CD3 | CD3 | CD2 or TAA2 |
| Hv 55 | CD3 | CD2 or TAA2 | CD2 or TAA2 | CD3 | TAA1 | CD3 |
| Hv 56 | CD3 | CD2 or TAA2 | TAA1 | CD3 | CD2 or TAA2 | CD3 |
| Hv 57 | CD3 | TAA1 | CD2 or TAA2 | CD3 | CD2 or TAA2 | CD3 |
| Hv 58 | CD3 | CD2 or TAA2 | CD2 or TAA2 | TAA1 | CD3 | CD3 |
| Hv 59 | CD3 | CD2 or TAA2 | TAA1 | CD2 or TAA2 | CD3 | CD3 |
| Hv 60 | CD3 | TAA1 | CD2 or TAA2 | CD2 or TAA2 | CD3 | CD3 |
| Hv 61 | CD2 or TAA2 | CD3 | CD3 | CD3 | CD2 or TAA2 | TAA1 |
| Hv 62 | CD2 or TAA2 | CD3 | CD3 | CD3 | TAA1 | CD2 or TAA2 |
| Hv 63 | TAA1 | CD3 | CD3 | CD3 | CD2 or TAA2 | CD2 or TAA2 |
| Hv 64 | CD2 or TAA2 | CD3 | CD3 | CD2 or TAA2 | CD3 | TAA1 |
| Hv 65 | CD2 or TAA2 | CD3 | CD3 | TAA1 | CD3 | CD2 or TAA2 |
| Hv 66 | TAA1 | CD3 | CD3 | CD2 or TAA2 | CD3 | CD2 or TAA2 |
| Hv 67 | CD2 or TAA2 | CD3 | CD3 | CD2 or TAA2 | TAA1 | CD3 |
| Hv 68 | CD2 or TAA2 | CD3 | CD3 | TAA1 | CD2 or TAA2 | CD3 |
| Hv 69 | TAA1 | CD3 | CD3 | CD2 or TAA2 | CD2 or TAA2 | CD3 |
| Hv 70 | CD2 or TAA2 | CD3 | CD2 or TAA2 | CD3 | CD3 | TAA1 |
| Hv 71 | CD2 or TAA2 | CD3 | TAA1 | CD3 | CD3 | CD2 or TAA2 |
| Hv 72 | TAA1 | CD3 | CD2 or TAA2 | CD3 | CD3 | CD2 or TAA2 |
| Hv 73 | CD2 or TAA2 | CD3 | CD2 or TAA2 | CD3 | TAA1 | CD3 |
| Hv 74 | CD2 or TAA2 | CD3 | TAA1 | CD3 | CD2 or TAA2 | CD3 |
| Hv 75 | TAA1 | CD3 | CD2 or TAA2 | CD3 | CD2 or TAA2 | CD3 |
| Hv 76 | CD2 or TAA2 | CD3 | CD2 or TAA2 | TAA1 | CD3 | CD3 |
| Hv 77 | CD2 or TAA2 | CD3 | TAA1 | CD2 or TAA2 | CD3 | CD3 |
| Hv 78 | TAA1 | CD3 | CD2 or TAA2 | CD2 or TAA2 | CD3 | CD3 |
| Hv 79 | CD2 or TAA2 | CD2 or TAA2 | CD3 | CD3 | CD3 | TAA1 |
| Hv 80 | CD2 or TAA2 | TAA1 | CD3 | CD3 | CD3 | CD2 or TAA2 |
| Hv 81 | TAA1 | CD2 or TAA2 | CD3 | CD3 | CD3 | CD2 or TAA2 |
| Hv 82 | CD2 or TAA2 | CD2 or TAA2 | CD3 | CD3 | TAA1 | CD3 |
| Hv 83 | CD2 or TAA2 | TAA1 | CD3 | CD3 | CD2 or TAA2 | CD3 |
| Hv 84 | TAA1 | CD2 or TAA2 | CD3 | CD3 | CD2 or TAA2 | CD3 |
| Hv 85 | CD2 or TAA2 | CD2 or TAA2 | CD3 | TAA1 | CD3 | CD3 |
| Hv 86 | CD2 or TAA2 | TAA1 | CD3 | CD2 or TAA2 | CD3 | CD3 |
| Hv 87 | TAA1 | CD2 or TAA2 | CD3 | CD2 or TAA2 | CD3 | CD3 |
| Hv 88 | CD2 or TAA2 | CD2 or TAA2 | TAA1 | CD3 | CD3 | CD3 |
| Hv 89 | CD2 or TAA2 | TAA1 | CD2 or TAA2 | CD3 | CD3 | CD3 |
| Hv 90 | TAA1 | CD2 or TAA2 | CD2 or TAA2 | CD3 | CD3 | CD3 |
| Hv 91 | CD3 | CD3 | CD3 | CD2 or TAA2 | TAA1 | TAA1 |
| Hv 92 | CD3 | CD3 | CD3 | TAA1 | CD2 or TAA2 | TAA1 |
| Hv 93 | CD3 | CD3 | CD3 | TAA1 | TAA1 | CD2 or TAA2 |
| Hv 94 | CD3 | CD3 | CD2 or TAA2 | CD3 | TAA1 | TAA1 |
| Hv 95 | CD3 | CD3 | TAA1 | CD3 | CD2 or TAA2 | TAA1 |
| Hv 96 | CD3 | CD3 | TAA1 | CD3 | TAA1 | CD2 or TAA2 |
| Hv 97 | CD3 | CD3 | CD2 or TAA2 | TAA1 | CD3 | TAA1 |
| Hv 98 | CD3 | CD3 | TAA1 | CD2 or TAA2 | CD3 | TAA1 |
| Hv 99 | CD3 | CD3 | TAA1 | TAA1 | CD3 | CD2 or TAA2 |
| Hv 100 | CD3 | CD3 | CD2 or TAA2 | TAA1 | TAA1 | CD3 |
| Hv 101 | CD3 | CD3 | TAA1 | CD2 or TAA2 | TAA1 | CD3 |
| Hv 102 | CD3 | CD3 | TAA1 | TAA1 | CD2 or TAA2 | CD3 |
| Hv 103 | CD3 | CD2 or TAA2 | CD3 | CD3 | TAA1 | TAA1 |
| Hv 104 | CD3 | TAA1 | CD3 | CD3 | CD2 or TAA2 | TAA1 |
| Hv 105 | CD3 | TAA1 | CD3 | CD3 | TAA1 | CD2 or TAA2 |
| Hv 106 | CD3 | CD2 or TAA2 | CD3 | TAA1 | CD3 | TAA1 |
| Hv 107 | CD3 | TAA1 | CD3 | CD2 or TAA2 | CD3 | TAA1 |
| Hv 108 | CD3 | TAA1 | CD3 | TAA1 | CD3 | CD2 or TAA2 |
| Hv 109 | CD3 | CD2 or TAA2 | CD3 | TAA1 | TAA1 | CD3 |
| Hv 110 | CD3 | TAA1 | CD3 | CD2 or TAA2 | TAA1 | CD3 |
| Hv 111 | CD3 | TAA1 | CD3 | TAA1 | CD2 or TAA2 | CD3 |
| Hv 112 | CD3 | CD2 or TAA2 | TAA1 | CD3 | CD3 | TAA1 |
| Hv 113 | CD3 | TAA1 | CD2 or TAA2 | CD3 | CD3 | TAA1 |
| Hv 114 | CD3 | TAA1 | TAA1 | CD3 | CD3 | CD2 or TAA2 |
| Hv 115 | CD3 | CD2 or TAA2 | TAA1 | CD3 | TAA1 | CD3 |
| Hv 116 | CD3 | TAA1 | CD2 or TAA2 | CD3 | TAA1 | CD3 |
| Hv 117 | CD3 | TAA1 | TAA1 | CD3 | CD2 or TAA2 | CD3 |
| Hv 118 | CD3 | CD2 or TAA2 | TAA1 | TAA1 | CD3 | CD3 |
| Hv 119 | CD3 | TAA1 | CD2 or TAA2 | TAA1 | CD3 | CD3 |
| Hv 120 | CD3 | TAA1 | TAA1 | CD2 or TAA2 | CD3 | CD3 |
| Hv 121 | CD2 or TAA2 | CD3 | CD3 | CD3 | TAA1 | TAA1 |
| Hv 122 | TAA1 | CD3 | CD3 | CD3 | CD2 or TAA2 | TAA1 |
| Hv 123 | TAA1 | CD3 | CD3 | CD3 | TAA1 | CD2 or TAA2 |
| Hv 124 | CD2 or TAA2 | CD3 | CD3 | TAA1 | CD3 | TAA1 |
| Hv 125 | TAA1 | CD3 | CD3 | CD2 or TAA2 | CD3 | TAA1 |
| Hv 126 | TAA1 | CD3 | CD3 | TAA1 | CD3 | CD2 or TAA2 |
| Hv 127 | CD2 or TAA2 | CD3 | CD3 | TAA1 | TAA1 | CD3 |
| Hv 128 | TAA1 | CD3 | CD3 | CD2 or TAA2 | TAA1 | CD3 |
| Hv 129 | TAA1 | CD3 | CD3 | TAA1 | CD2 or TAA2 | CD3 |
| Hv 130 | CD2 or TAA2 | CD3 | TAA1 | CD3 | CD3 | TAA1 |
| Hv 131 | TAA1 | CD3 | CD2 or TAA2 | CD3 | CD3 | TAA1 |
| Hv 132 | TAA1 | CD3 | TAA1 | CD3 | CD3 | CD2 or TAA2 |
| Hv 133 | CD2 or TAA2 | CD3 | TAA1 | CD3 | TAA1 | CD3 |
| Hv 134 | TAA1 | CD3 | CD2 or TAA2 | CD3 | TAA1 | CD3 |
| Hv 135 | TAA1 | CD3 | TAA1 | CD3 | CD2 or TAA2 | CD3 |
| Hv 136 | CD2 or TAA2 | CD3 | TAA1 | TAA1 | CD3 | CD3 |
| Hv 137 | TAA1 | CD3 | CD2 or TAA2 | TAA1 | CD3 | CD3 |
| Hv 138 | TAA1 | CD3 | TAA1 | CD2 or TAA2 | CD3 | CD3 |
| Hv 139 | CD2 or TAA2 | TAA1 | CD3 | CD3 | CD3 | TAA1 |
| Hv 140 | TAA1 | CD2 or TAA2 | CD3 | CD3 | CD3 | TAA1 |
| Hv 141 | TAA1 | TAA1 | CD3 | CD3 | CD3 | CD2 or TAA2 |
| Hv 142 | CD2 or TAA2 | TAA1 | CD3 | CD3 | TAA1 | CD3 |
| Hv 143 | TAA1 | CD2 or TAA2 | CD3 | CD3 | TAA1 | CD3 |
| Hv 144 | TAA1 | TAA1 | CD3 | CD3 | CD2 or TAA2 | CD3 |
| Hv 145 | CD2 or TAA2 | TAA1 | CD3 | TAA1 | CD3 | CD3 |
| Hv 146 | TAA1 | CD2 or TAA2 | CD3 | TAA1 | CD3 | CD3 |
| Hv 147 | TAA1 | TAA1 | CD3 | CD2 or TAA2 | CD3 | CD3 |
| Hv 148 | CD2 or TAA2 | TAA1 | TAA1 | CD3 | CD3 | CD3 |
| Hv 149 | TAA1 | CD2 or TAA2 | TAA1 | CD3 | CD3 | CD3 |
| Hv 150 | TAA1 | TAA1 | CD2 or TAA2 | CD3 | CD3 | CD3 |
| Hv 151 | CD3 | CD3 | CD2 or TAA2 | CD2 or TAA2 | TAA1 | TAA1 |
| Hv 152 | CD3 | CD3 | CD2 or TAA2 | TAA1 | CD2 or TAA2 | TAA1 |
| Hv 153 | CD3 | CD3 | CD2 or TAA2 | TAA1 | TAA1 | CD2 or TAA2 |
| Hv 154 | CD3 | CD3 | TAA1 | CD2 or TAA2 | CD2 or TAA2 | TAA1 |
| Hv 155 | CD3 | CD3 | TAA1 | CD2 or TAA2 | TAA1 | CD2 or TAA2 |
| Hv 156 | CD3 | CD3 | TAA1 | TAA1 | CD2 or TAA2 | CD2 or TAA2 |
| Hv 157 | CD3 | CD2 or TAA2 | CD3 | CD2 or TAA2 | TAA1 | TAA1 |
| Hv 158 | CD3 | CD2 or TAA2 | CD3 | TAA1 | CD2 or TAA2 | TAA1 |
| Hv 159 | CD3 | CD2 or TAA2 | CD3 | TAA1 | TAA1 | CD2 or TAA2 |
| Hv 160 | CD3 | TAA1 | CD3 | CD2 or TAA2 | CD2 or TAA2 | TAA1 |
| Hv 161 | CD3 | TAA1 | CD3 | CD2 or TAA2 | TAA1 | CD2 or TAA2 |
| Hv 162 | CD3 | TAA1 | CD3 | TAA1 | CD2 or TAA2 | CD2 or TAA2 |
| Hv 163 | CD3 | CD2 or TAA2 | CD2 or TAA2 | CD3 | TAA1 | TAA1 |
| Hv 164 | CD3 | CD2 or TAA2 | TAA1 | CD3 | CD2 or TAA2 | TAA1 |
| Hv 165 | CD3 | CD2 or TAA2 | TAA1 | CD3 | TAA1 | CD2 or TAA2 |
| Hv 166 | CD3 | TAA1 | CD2 or TAA2 | CD3 | CD2 or TAA2 | TAA1 |
| Hv 167 | CD3 | TAA1 | CD2 or TAA2 | CD3 | TAA1 | CD2 or TAA2 |
| Hv 168 | CD3 | TAA1 | TAA1 | CD3 | CD2 or TAA2 | CD2 or TAA2 |
| Hv 169 | CD3 | CD2 or TAA2 | CD2 or TAA2 | TAA1 | CD3 | TAA1 |
| Hv 170 | CD3 | CD2 or TAA2 | TAA1 | CD2 or TAA2 | CD3 | TAA1 |
| Hv 171 | CD3 | CD2 or TAA2 | TAA1 | TAA1 | CD3 | CD2 or TAA2 |
| Hv 172 | CD3 | TAA1 | CD2 or TAA2 | CD2 or TAA2 | CD3 | TAA1 |
| Hv 173 | CD3 | TAA1 | CD2 or TAA2 | TAA1 | CD3 | CD2 or TAA2 |
| Hv 174 | CD3 | TAA1 | TAA1 | CD2 or TAA2 | CD3 | CD2 or TAA2 |
| Hv 175 | CD3 | CD2 or TAA2 | CD2 or TAA2 | TAA1 | TAA1 | CD3 |
| Hv 176 | CD3 | CD2 or TAA2 | TAA1 | CD2 or TAA2 | TAA1 | CD3 |
| Hv 177 | CD3 | CD2 or TAA2 | TAA1 | TAA1 | CD2 or TAA2 | CD3 |
| Hv 178 | CD3 | TAA1 | CD2 or TAA2 | CD2 or TAA2 | TAA1 | CD3 |
| Hv 179 | CD3 | TAA1 | CD2 or TAA2 | TAA1 | CD2 or TAA2 | CD3 |
| Hv 180 | CD3 | TAA1 | TAA1 | CD2 or TAA2 | CD2 or TAA2 | CD3 |
| Hv 181 | CD2 or TAA2 | CD3 | CD3 | CD2 or TAA2 | TAA1 | TAA1 |
| Hv 182 | CD2 or TAA2 | CD3 | CD3 | TAA1 | CD2 or TAA2 | TAA1 |
| Hv 183 | CD2 or TAA2 | CD3 | CD3 | TAA1 | TAA1 | CD2 or TAA2 |
| Hv 184 | TAA1 | CD3 | CD3 | CD2 or TAA2 | CD2 or TAA2 | TAA1 |
| Hv 185 | TAA1 | CD3 | CD3 | CD2 or TAA2 | TAA1 | CD2 or TAA2 |
| Hv 186 | TAA1 | CD3 | CD3 | TAA1 | CD2 or TAA2 | CD2 or TAA2 |
| Hv 187 | CD2 or TAA2 | CD3 | CD2 or TAA2 | CD3 | TAA1 | TAA1 |
| Hv 188 | CD2 or TAA2 | CD3 | TAA1 | CD3 | CD2 or TAA2 | TAA1 |
| Hv 189 | CD2 or TAA2 | CD3 | TAA1 | CD3 | TAA1 | CD2 or TAA2 |
| Hv 190 | TAA1 | CD3 | CD2 or TAA2 | CD3 | CD2 or TAA2 | TAA1 |
| Hv 191 | TAA1 | CD3 | CD2 or TAA2 | CD3 | TAA1 | CD2 or TAA2 |
| Hv 192 | TAA1 | CD3 | TAA1 | CD3 | CD2 or TAA2 | CD2 or TAA2 |
| Hv 193 | CD2 or TAA2 | CD3 | CD2 or TAA2 | TAA1 | CD3 | TAA1 |
| Hv 194 | CD2 or TAA2 | CD3 | TAA1 | CD2 or TAA2 | CD3 | TAA1 |
| Hv 195 | CD2 or TAA2 | CD3 | TAA1 | TAA1 | CD3 | CD2 or TAA2 |
| Hv 196 | TAA1 | CD3 | CD2 or TAA2 | CD2 or TAA2 | CD3 | TAA1 |
| Hv 197 | TAA1 | CD3 | CD2 or TAA2 | TAA1 | CD3 | CD2 or TAA2 |
| Hv 198 | TAA1 | CD3 | TAA1 | CD2 or TAA2 | CD3 | CD2 or TAA2 |
| Hv 199 | CD2 or TAA2 | CD3 | CD2 or TAA2 | TAA1 | TAA1 | CD3 |
| Hv 200 | CD2 or TAA2 | CD3 | TAA1 | CD2 or TAA2 | TAA1 | CD3 |
| Hv 201 | CD2 or TAA2 | CD3 | TAA1 | TAA1 | CD2 or TAA2 | CD3 |
| Hv 202 | TAA1 | CD3 | CD2 or TAA2 | CD2 or TAA2 | TAA1 | CD3 |
| Hv 203 | TAA1 | CD3 | CD2 or TAA2 | TAA1 | CD2 or TAA2 | CD3 |
| Hv 204 | TAA1 | CD3 | TAA1 | CD2 or TAA2 | CD2 or TAA2 | CD3 |
| Hv 205 | CD2 or TAA2 | CD2 or TAA2 | CD3 | CD3 | TAA1 | TAA1 |
| Hv 206 | CD2 or TAA2 | TAA1 | CD3 | CD3 | CD2 or TAA2 | TAA1 |
| Hv 207 | CD2 or TAA2 | TAA1 | CD3 | CD3 | TAA1 | CD2 or TAA2 |
| Hv 208 | TAA1 | CD2 or TAA2 | CD3 | CD3 | CD2 or TAA2 | TAA1 |
| Hv 209 | TAA1 | CD2 or TAA2 | CD3 | CD3 | TAA1 | CD2 or TAA2 |
| Hv 210 | TAA1 | TAA1 | CD3 | CD3 | CD2 or TAA2 | CD2 or TAA2 |
| Hv 211 | CD2 or TAA2 | CD2 or TAA2 | CD3 | TAA1 | CD3 | TAA1 |
| Hv 212 | CD2 or TAA2 | TAA1 | CD3 | CD2 or TAA2 | CD3 | TAA1 |
| Hv 213 | CD2 or TAA2 | TAA1 | CD3 | TAA1 | CD3 | CD2 or TAA2 |
| Hv 214 | TAA1 | CD2 or TAA2 | CD3 | CD2 or TAA2 | CD3 | TAA1 |
| Hv 215 | TAA1 | CD2 or TAA2 | CD3 | TAA1 | CD3 | CD2 or TAA2 |
| Hv 216 | TAA1 | TAA1 | CD3 | CD2 or TAA2 | CD3 | CD2 or TAA2 |
| Hv 217 | CD2 or TAA2 | CD2 or TAA2 | CD3 | TAA1 | TAA1 | CD3 |
| Hv 218 | CD2 or TAA2 | TAA1 | CD3 | CD2 or TAA2 | TAA1 | CD3 |
| Hv 219 | CD2 or TAA2 | TAA1 | CD3 | TAA1 | CD2 or TAA2 | CD3 |
| Hv 220 | TAA1 | CD2 or TAA2 | CD3 | CD2 or TAA2 | TAA1 | CD3 |
| Hv 221 | TAA1 | CD2 or TAA2 | CD3 | TAA1 | CD2 or TAA2 | CD3 |
| Hv 222 | TAA1 | TAA1 | CD3 | CD2 or TAA2 | CD2 or TAA2 | CD3 |
| Hv 223 | CD2 or TAA2 | CD2 or TAA2 | TAA1 | CD3 | CD3 | TAA1 |
| Hv 224 | CD2 or TAA2 | TAA1 | CD2 or TAA2 | CD3 | CD3 | TAA1 |
| Hv 225 | CD2 or TAA2 | TAA1 | TAA1 | CD3 | CD3 | CD2 or TAA2 |
| Hv 226 | TAA1 | CD2 or TAA2 | CD2 or TAA2 | CD3 | CD3 | TAA1 |
| Hv 227 | TAA1 | CD2 or TAA2 | TAA1 | CD3 | CD3 | CD2 or TAA2 |
| Hv 228 | TAA1 | TAA1 | CD2 or TAA2 | CD3 | CD3 | CD2 or TAA2 |
| Hv 229 | CD2 or TAA2 | CD2 or TAA2 | TAA1 | CD3 | TAA1 | CD3 |
| Hv 230 | CD2 or TAA2 | TAA1 | CD2 or TAA2 | CD3 | TAA1 | CD3 |
| Hv 231 | CD2 or TAA2 | TAA1 | TAA1 | CD3 | CD2 or TAA2 | CD3 |
| Hv 232 | TAA1 | CD2 or TAA2 | CD2 or TAA2 | CD3 | TAA1 | CD3 |
| Hv 233 | TAA1 | CD2 or TAA2 | TAA1 | CD3 | CD2 or TAA2 | CD3 |
| Hv 234 | TAA1 | TAA1 | CD2 or TAA2 | CD3 | CD2 or TAA2 | CD3 |
| Hv 235 | CD2 or TAA2 | CD2 or TAA2 | TAA1 | TAA1 | CD3 | CD3 |
| Hv 236 | CD2 or TAA2 | TAA1 | CD2 or TAA2 | TAA1 | CD3 | CD3 |
| Hv 237 | CD2 or TAA2 | TAA1 | TAA1 | CD2 or TAA2 | CD3 | CD3 |
| Hv 238 | TAA1 | CD2 or TAA2 | CD2 or TAA2 | TAA1 | CD3 | CD3 |
| Hv 239 | TAA1 | CD2 or TAA2 | TAA1 | CD2 or TAA2 | CD3 | CD3 |
| Hv 240 | TAA1 | TAA1 | CD2 or TAA2 | CD2 or TAA2 | CD3 | CD3 |
| Hv 241 | CD3 | CD3 | CD2 or TAA2 | TAA1 | TAA1 | TAA1 |
| Hv 242 | CD3 | CD3 | TAA1 | CD2 or TAA2 | TAA1 | TAA1 |
| Hv 243 | CD3 | CD3 | TAA1 | TAA1 | CD2 or TAA2 | TAA1 |
| Hv 244 | CD3 | CD3 | TAA1 | TAA1 | TAA1 | CD2 or TAA2 |
| Hv 245 | CD3 | CD2 or TAA2 | CD3 | TAA1 | TAA1 | TAA1 |
| Hv 246 | CD3 | TAA1 | CD3 | CD2 or TAA2 | TAA1 | TAA1 |
| Hv 247 | CD3 | TAA1 | CD3 | TAA1 | CD2 or TAA2 | TAA1 |
| Hv 248 | CD3 | TAA1 | CD3 | TAA1 | TAA1 | CD2 or TAA2 |
| Hv 249 | CD3 | CD2 or TAA2 | TAA1 | CD3 | TAA1 | TAA1 |
| Hv 250 | CD3 | TAA1 | CD2 or TAA2 | CD3 | TAA1 | TAA1 |
| Hv 251 | CD3 | TAA1 | TAA1 | CD3 | CD2 or TAA2 | TAA1 |
| Hv 252 | CD3 | TAA1 | TAA1 | CD3 | TAA1 | CD2 or TAA2 |
| Hv 253 | CD3 | CD2 or TAA2 | TAA1 | TAA1 | CD3 | TAA1 |
| Hv 254 | CD3 | TAA1 | CD2 or TAA2 | TAA1 | CD3 | TAA1 |
| Hv 255 | CD3 | TAA1 | TAA1 | CD2 or TAA2 | CD3 | TAA1 |
| Hv 256 | CD3 | TAA1 | TAA1 | TAA1 | CD3 | CD2 or TAA2 |
| Hv 257 | CD3 | CD2 or TAA2 | TAA1 | TAA1 | TAA1 | CD3 |
| Hv 258 | CD3 | TAA1 | CD2 or TAA2 | TAA1 | TAA1 | CD3 |
| Hv 259 | CD3 | TAA1 | TAA1 | CD2 or TAA2 | TAA1 | CD3 |
| Hv 260 | CD3 | TAA1 | TAA1 | TAA1 | CD2 or TAA2 | CD3 |
| Hv 261 | CD2 or TAA2 | CD3 | CD3 | TAA1 | TAA1 | TAA1 |
| Hv 262 | TAA1 | CD3 | CD3 | CD2 or TAA2 | TAA1 | TAA1 |
| Hv 263 | TAA1 | CD3 | CD3 | TAA1 | CD2 or TAA2 | TAA1 |
| Hv 264 | TAA1 | CD3 | CD3 | TAA1 | TAA1 | CD2 or TAA2 |
| Hv 265 | CD2 or TAA2 | CD3 | TAA1 | CD3 | TAA1 | TAA1 |
| Hv 266 | TAA1 | CD3 | CD2 or TAA2 | CD3 | TAA1 | TAA1 |
| Hv 267 | TAA1 | CD3 | TAA1 | CD3 | CD2 or TAA2 | TAA1 |
| Hv 268 | TAA1 | CD3 | TAA1 | CD3 | TAA1 | CD2 or TAA2 |
| Hv 269 | CD2 or TAA2 | CD3 | TAA1 | TAA1 | CD3 | TAA1 |
| Hv 270 | TAA1 | CD3 | CD2 or TAA2 | TAA1 | CD3 | TAA1 |
| Hv 271 | TAA1 | CD3 | TAA1 | CD2 or TAA2 | CD3 | TAA1 |
| Hv 272 | TAA1 | CD3 | TAA1 | TAA1 | CD3 | CD2 or TAA2 |
| Hv 273 | CD2 or TAA2 | CD3 | TAA1 | TAA1 | TAA1 | CD3 |
| Hv 274 | TAA1 | CD3 | CD2 or TAA2 | TAA1 | TAA1 | CD3 |
| Hv 275 | TAA1 | CD3 | TAA1 | CD2 or TAA2 | TAA1 | CD3 |
| Hv 276 | TAA1 | CD3 | TAA1 | TAA1 | CD2 or TAA2 | CD3 |
| Hv 277 | CD2 or TAA2 | TAA1 | CD3 | CD3 | TAA1 | TAA1 |
| Hv 278 | TAA1 | CD2 or TAA2 | CD3 | CD3 | TAA1 | TAA1 |
| Hv 279 | TAA1 | TAA1 | CD3 | CD3 | CD2 or TAA2 | TAA1 |
| Hv 280 | TAA1 | TAA1 | CD3 | CD3 | TAA1 | CD2 or TAA2 |
| Hv 281 | CD2 or TAA2 | TAA1 | CD3 | TAA1 | CD3 | TAA1 |
| Hv 282 | TAA1 | CD2 or TAA2 | CD3 | TAA1 | CD3 | TAA1 |
| Hv 283 | TAA1 | TAA1 | CD3 | CD2 or TAA2 | CD3 | TAA1 |
| Hv 284 | TAA1 | TAA1 | CD3 | TAA1 | CD3 | CD2 or TAA2 |
| Hv 285 | CD2 or TAA2 | TAA1 | CD3 | TAA1 | TAA1 | CD3 |
| Hv 286 | TAA1 | CD2 or TAA2 | CD3 | TAA1 | TAA1 | CD3 |
| Hv 287 | TAA1 | TAA1 | CD3 | CD2 or TAA2 | TAA1 | CD3 |
| Hv 288 | TAA1 | TAA1 | CD3 | TAA1 | CD2 or TAA2 | CD3 |
| Hv 289 | CD2 or TAA2 | TAA1 | TAA1 | CD3 | CD3 | TAA1 |
| Hv 290 | TAA1 | CD2 or TAA2 | TAA1 | CD3 | CD3 | TAA1 |
| Hv 291 | TAA1 | TAA1 | CD2 or TAA2 | CD3 | CD3 | TAA1 |
| Hv 292 | TAA1 | TAA1 | TAA1 | CD3 | CD3 | CD2 or TAA2 |
| Hv 293 | CD2 or TAA2 | TAA1 | TAA1 | CD3 | TAA1 | CD3 |
| Hv 294 | TAA1 | CD2 or TAA2 | TAA1 | CD3 | TAA1 | CD3 |
| Hv 295 | TAA1 | TAA1 | CD2 or TAA2 | CD3 | TAA1 | CD3 |
| Hv 296 | TAA1 | TAA1 | TAA1 | CD3 | CD2 or TAA2 | CD3 |
| Hv 297 | CD2 or TAA2 | TAA1 | TAA1 | TAA1 | CD3 | CD3 |
| Hv 298 | TAA1 | CD2 or TAA2 | TAA1 | TAA1 | CD3 | CD3 |
| Hv 299 | TAA1 | TAA1 | CD2 or TAA2 | TAA1 | CD3 | CD3 |
| Hv 300 | TAA1 | TAA1 | TAA1 | CD2 or TAA2 | CD3 | CD3 |
| Hv 301 | CD3 | CD2 or TAA2 | TAA1 | TAA1 | TAA1 | TAA1 |
| Hv 302 | CD3 | TAA1 | CD2 or TAA2 | TAA1 | TAA1 | TAA1 |
| Hv 303 | CD3 | TAA1 | TAA1 | CD2 or TAA2 | TAA1 | TAA1 |
| Hv 304 | CD3 | TAA1 | TAA1 | TAA1 | CD2 or TAA2 | TAA1 |
| Hv 305 | CD3 | TAA1 | TAA1 | TAA1 | TAA1 | CD2 or TAA2 |
| Hv 306 | CD2 or TAA2 | CD3 | TAA1 | TAA1 | TAA1 | TAA1 |
| Hv 307 | TAA1 | CD3 | CD2 or TAA2 | TAA1 | TAA1 | TAA1 |
| Hv 308 | TAA1 | CD3 | TAA1 | CD2 or TAA2 | TAA1 | TAA1 |
| Hv 309 | TAA1 | CD3 | TAA1 | TAA1 | CD2 or TAA2 | TAA1 |
| Hv 310 | TAA1 | CD3 | TAA1 | TAA1 | TAA1 | CD2 or TAA2 |
| Hv 311 | CD2 or TAA2 | TAA1 | CD3 | TAA1 | TAA1 | TAA1 |
| Hv 312 | TAA1 | CD2 or TAA2 | CD3 | TAA1 | TAA1 | TAA1 |
| Hv 313 | TAA1 | TAA1 | CD3 | CD2 or TAA2 | TAA1 | TAA1 |
| Hv 314 | TAA1 | TAA1 | CD3 | TAA1 | CD2 or TAA2 | TAA1 |
| Hv 315 | TAA1 | TAA1 | CD3 | TAA1 | TAA1 | CD2 or TAA2 |
| Hv 316 | CD2 or TAA2 | TAA1 | TAA1 | CD3 | TAA1 | TAA1 |
| Hv 317 | TAA1 | CD2 or TAA2 | TAA1 | CD3 | TAA1 | TAA1 |
| Hv 318 | TAA1 | TAA1 | CD2 or TAA2 | CD3 | TAA1 | TAA1 |
| Hv 319 | TAA1 | TAA1 | TAA1 | CD3 | CD2 or TAA2 | TAA1 |
| Hv 320 | TAA1 | TAA1 | TAA1 | CD3 | TAA1 | CD2 or TAA2 |
| Hv 321 | CD2 or TAA2 | TAA1 | TAA1 | TAA1 | CD3 | TAA1 |
| Hv 322 | TAA1 | CD2 or TAA2 | TAA1 | TAA1 | CD3 | TAA1 |
| Hv 323 | TAA1 | TAA1 | CD2 or TAA2 | TAA1 | CD3 | TAA1 |
| Hv 324 | TAA1 | TAA1 | TAA1 | CD2 or TAA2 | CD3 | TAA1 |
| Hv 325 | TAA1 | TAA1 | TAA1 | TAA1 | CD3 | CD2 or TAA2 |
| Hv 326 | CD2 or TAA2 | TAA1 | TAA1 | TAA1 | TAA1 | CD3 |
| Hv 327 | TAA1 | CD2 or TAA2 | TAA1 | TAA1 | TAA1 | CD3 |
| Hv 328 | TAA1 | TAA1 | CD2 or TAA2 | TAA1 | TAA1 | CD3 |
| Hv 329 | TAA1 | TAA1 | TAA1 | CD2 or TAA2 | TAA1 | CD3 |
| Hv 330 | TAA1 | TAA1 | TAA1 | TAA1 | CD2 or TAA2 | CD3 |

### 7.7. Exemplary Multispecific Binding Molecules

[0514] Exemplary MBM configurations are shown FIGS. 3A-3E. The scFv, Fab, non-immunoglobulin based ABM, and Fc each can have the characteristics described for these components in Sections 7.2 to 7.4. The components of the MBM configurations can be associated with each other by any of the means described in Sections 7.3 and 7.4 (e.g., by direct bonds, ABM linkers, disulfide bonds, Fc domains with modified with knob in hole interactions, etc.). The orientations and associations of the various components shown in FIGS. 3A-3E are merely exemplary; as will be appreciated by skilled artisans, other orientations and associations can be suitable (e.g., as described in Sections 7.3 and 7.4).

[0515] MBMs are not limited to the configurations shown in FIGS. 3A-3E. Other configurations that can be used are known to those skilled in the art. See, e.g., WO 2014/145806; WO 2017/124002; Liu et al., 2017, Front Immunol. 8:38; Brinkmann & Kontermann, 2017, mAbs 9:2, 182-212; US 2016/0355600; Klein et al., 2016, MAbs 8(6):1010-20; and US 2017/0145116.

[0516] 7.7.1. Exemplary MBMs

[0517] The MBMs can be bispecific, e.g., they have two antigen-binding domains, wherein one antigen-binding domain binds CD3, and and one antigen-binding domain binds a TAA.

[0518] 7.7.2. Exemplary Trivalent MBMs

[0519] The MBMs can be trivalent, e.g., they have three antigen-binding domains, wherein at least one of the three antigen binding domains binds CD3, from zero to one of the three antigen binding domains binds CD2, and at least one of the three antigen binding domains binds a TAA.

[0520] 7.7.3. Exemplary Tetravalent MBMs

[0521] The MBMs can be tetravalent, e.g., they have four antigen-binding domains, wherein at least one of the four antigen binding domains binds CD3, from zero to two of the four antigen binding domains binds CD2 and at least one of the four antigen binding domains binds a TAA.

### 7.8. TCR ABMs

[0522] The MBMs can contain an ABM that specifically binds to a component of a TCR complex. The TCR is a disulfide-linked membrane-anchored heterodimeric protein normally consisting of the highly variable alpha (α) and beta (β) chains expressed as part of a complex with the invariant CD3 chain molecules. T cells expressing this receptor are referred to as α:β (or αβ) T cells, though a minority of T cells express an alternate receptor, formed by variable gamma (γ) and delta (δ) chains, referred as γδ T cells.

[0523] In a preferred embodiment, MBMs contain an ABM that specifically binds to CD3, for example, the CD3 antigen binding domains found in Table 1 or Table 19.

[0524] 7.8.1. CD3 ABMs

[0525] The MBMs can contain an ABM that specifically binds to CD3. The term “CD3” refers to the cluster of differentiation 3 co-receptor (or co-receptor complex, or polypeptide chain of the co-receptor complex) of the T cell receptor. CD3 proteins can also include variants. CD3 proteins can also include fragments. CD3 proteins also include post-translational modifications of the CD3 amino acid sequences. Post-translational modifications include, but are not limited to, N- and O-linked glycosylation.

[0526] In some embodiments, a MBM can comprise an ABM which is an anti-CD3 antibody or an antigen-binding domain thereof. Exemplary anti-CD3 VH, VL, and scFV sequences that can be used in MBM are provided in Table 1 and Table 19.

[0527] In some embodiments, a CD3 ABM comprises the CDR sequences of NOV292. In some embodiments, a CD3 ABM comprises the CDR sequences of NOV123. In some embodiments, a CD3 ABM comprises the CDR sequences of NOV453. In some embodiments, a CD3 ABM comprises the CDR sequences of NOV229. In some embodiments, a CD3 ABM comprises the CDR sequences of NOV110. In some embodiments, a CD3 ABM comprises the CDR sequences of NOV832. In some embodiments, a CD3 ABM comprises the CDR sequences of NOV589. In some embodiments, a CD3 ABM comprises the CDR sequences of NOV580. In some embodiments, a CD3 ABM comprises the CDR sequences of NOV567. In some embodiments, a CD3 ABM comprises the CDR sequences of NOV221.

[0528] A MBM can comprise the complete heavy and light variable sequences of any of the CD3 sequences found in Table 1 or Table 19. In some embodiments, a MBM comprises a CD3 ABM which comprises the VH and VL sequences of NOV292. In some embodiments, a MBM comprises a CD3 ABM which comprises the VH and VL sequences of NOV123. In some embodiments, a MBM comprises a CD3 ABM which comprises the VH and VL sequences of NOV453. In some embodiments, a MBM comprises a CD3 ABM which comprises the VH and VL sequences of NOV229. In some embodiments, a MBM comprises a CD3 ABM which comprises the VH and VL sequences of NOV110. In some embodiments, a MBM comprises a CD3 ABM which comprises the VH and VL sequences of NOV832. In some embodiments, a MBM comprises a CD3 ABM which comprises the VH and VL sequences of NOV589. In some embodiments, a MBM comprises a CD3 ABM which comprises the VH and VL sequences of NOV580. In some embodiments, a MBM comprises a CD3 ABM which comprises the VH and VL sequences of NOV567. In some embodiments, a MBM comprises a CD3 ABM which comprises the VH and VL sequences of NOV221.

[0529] 7.8.2. TCR-α/β ABMs

[0530] The MBMs can contain an ABM that specifically binds to the TCR-α chain, the TCR-13 chain, or the TCR-αβ dimer. Exemplary anti-TCR-α/β antibodies are known in the art (see, e.g., US 2012/0034221; Borst et al., 1990, Hum Immunol. 29(3):175-88 (describing antibody BMA031)). The VH, VL, and Kabat CDR sequences of antibody BMA031 are provided in Table 12.

TABLE 12
BMA031 sequences

| Domain | Sequence | SEQ ID NO: |
|---|---|---|
| BMA031 | KASGYKFTSYVMH | SEQ ID NO: 79 |
| CDR-H1 | | |
| BMA031 | YINPYNDVTKYNEKFK | SEQ ID NO: 80 |
| CDR-H2 | | |
| BMA031 | GSYYDYDGFVY | SEQ ID NO: 81 |
| CDR-H3 | | |
| BMA031 | SATSSVSYMH | SEQ ID NO: 82 |
| CDR-L1 | | |
| BMA031 | DTSKLAS | SEQ ID NO: 83 |
| CDR-L2 | | |
| BMA031 | QQWSSNPLT | SEQ ID NO: 84 |
| CDR-L3 | | |
| BMA031 | EVQLQQSGPELVKPGASVKMSCKASGYKFTSYVMHVVVKQK | SEQ ID NO: 85 |
| VH | PGQGLEWIGYINPYNDVTKYNEKFKGKATLTSDKSSSTAYME | |
| | LSSLTSEDSAVHYCARGSYYDYDGFVYWGQGTLVTVSA | |
| BMA031 | QIVLTQSPAIMSASPGEKVTMTCSATSSVSYMHVVYQQKSGT | SEQ ID NO: 86 |
| VL | SPKRWIYDTSKLASGVPARFSGSGSGTSYSLTISSMEAEDAA | |
| | TYYCQQWSSNPLTFGAGTKLELK | |

[0531] In an embodiment, a TCR ABM can comprise the CDR sequences of antibody BMA031. In other embodiments, a TCR ABM can comprise the VH and VL sequences of antibody BMA031.

[0532] 7.8.3. TCR-γ/δ ABMs

[0533] The MBMs can contain an ABM that specifically binds to the TCR-γ chain, the TCR-δ chain, or the TCR-γδ dimer. Exemplary anti-TCR-γ/δ antibodies are known in the art (see, e.g., U.S. Pat. No. 5,980,892 (describing δTCS1, produced by the hybridoma deposited with the ATCC as accession number HB 9578)).

### 7.9. CD2 ABMs

[0534] 7.9.1. Immunoglobulin-Based CD2 ABMs

[0535] In some embodiments, a MBM can comprise an ABM which is an anti-CD2 antibody or an antigen-binding domain thereof. Exemplary anti-CD2 antibodies are known in the art (see, e.g., U.S. Pat. No. 6,849,258, CN102827281A, US 2003/0139579 A1, and U.S. Pat. No. 5,795,572). Table 13 provides exemplary CDR, VH, and VL sequences that can be included in anti-CD2 antibodies or antigen-binding fragments thereof, for use in MBMs.

TABLE 13
Immunoglobulin Based CD2 Binders

| | | | SEQ ID |
|---|---|---|---|
| Name | Domain | Sequence | NO: |
| CD2-1 | CDR-H1 | EYYMY (Rat Lo-CD2a = BTI-322 from FIG. 33 of U.S. Pat. | SEQ ID |
| | | No. 6,849,258) | NO: 87 |
| CD2-1 | CDR-H2 | RIDPEDGSIDYVEKFKK (Rat Lo-CD2a = BTI-322 from | SEQ ID |
| | | FIG. 33 of U.S. Pat. No. 6,849,258) | NO: 88 |
| CD2-1 | CDR-H3 | GKFNYRFAY (Rat Lo-CD2a = BTI-322 from FIG. 33 of | SEQ ID |
| | | U.S. Pat. No. 6,849,258) | NO: 89 |
| CD2-1 | CDR-L1 | RSSQSLLHSSGNTYLN (Rat Lo-CD2a = BTI-322 from | SEQ ID |
| | | FIG. 31 of U.S. Pat. No. 6,849,258) | NO: 90 |
| CD2-1 | CDR-L2 | LVSKLES (Rat Lo-CD2a = BTI-322 from FIG. 31 of U.S. Pat. | SEQ ID |
| | | No. 6,849,258) | NO: 91 |
| CD2-1 | CDR-L3 | QFTHYPYT (Rat Lo-CD2a = BTI-322 from FIG. 31 of | SEQ ID |
| | | U.S. Pat. No. 6,849,258) | NO: 92 |
| CD2-1 | VH | EVQLQQSGPELQRPGASVKLSCKASGYIFTEYYMYVVV | SEQ ID |
| | | KQRPKQGLELVGRIDPEDGSIDYVEKFKKKATLTADTSS | NO: 93 |
| | | NTAYMQLSSLTSEDTATYFCARGKFNYRFAYWGQGTL | |
| | | VTVSS (SEQ ID NO: 100 of U.S. Pat. No. 6,849,258) | |
| CD2-1 | VL | DVVLTQTPPTLLATIGQSVSISCRSSQSLLHSSGNTYLN | SEQ ID |
| | | WLLQRTGQSPQPLIYLVSKLESGVPNRFSGSGSGTDFT | NO: 94 |
| | | LKISGVEAEDLGVYYCMQFTHYPYTFGAGTKLELK (Rat | |
| | | Lo-CD2a Vk from SEQ ID NO: 92, without signal | |
| | | sequence as shown in FIG. 31 of U.S. Pat. No. 6,849,258) | |
| hu1CD2-1 | VH | QVQLVQSGAEVKKPGASVKVSCKASGYTFTEYYMYVVV | SEQ ID |
| | | RQAPGQGLELMGRIDPEDGSIDYVEKFKKKVTLTADTS | NO: 95 |
| | | SSTAYMELSSLTSDDTAVYYCARGKFNYRFAYWGQGT | |
| | | LVTVSS (SEQ ID NO: 101 of U.S. Pat. No. 6,849,258) | |
| huCD2a | VL | DVVMTQSPPSLLVTLGQPASISCRSSQSLLHSSGNTYL | SEQ ID |
| | | NWLLQRPGQSPQPLIYLVSKLESGVPDRFSGSGSGTDF | NO: 96 |
| | | TLKISGVEAEDVGVYYCMQFTHYPYTFGQGTKLEIK | |
| | | (SEQ ID NO: 96 of U.S. Pat. No. 6,849,258) | |
| hu2CD2-1 | VH | EVQLQQSGPELQRPGASVKLSCKASGYIFTEYYMYVVV | SEQ ID |
| | | KQRPKQGLELVGRIDPEDGSIDYVEKFKKKATLTADTSS | NO: 97 |
| | | NTAYMQLSSLTSEDTATYFCARGKFNYRFAYWGQGTL | |
| | | VTVSS (Vh of MEDI-507; SEQ ID NO: 105 of U.S. Pat. No. | |
| | | 6,849,258) | |
| huCD2a | VL | DVVMTQSPPSLLVTLGQPASISCRSSQSLLHSSGNTYL | SEQ ID |
| | | NWLLQRPGQSPQPLIYLVSKLESGVPDRFSGSGSGTDF | NO: 98 |
| | | TLKISGVEAEDVGVYYCMQFTHYPYTFGQGTKLEIK (SEQ ID NO: 96 of | |
| | | U.S. Pat. No. 6,849,258)(same as hu1CD2-1) | |

[0536] In some embodiments, a CD2 ABM comprises the CDR sequences of CD2-1 (SEQ ID NOS: 87-92). In some embodiments, a CD2 ABM comprises the heavy and light chain variable sequences of CD2-1 (SEQ ID NO:93-94). In some embodiments, a CD2 ABM comprises the heavy and light chain variable sequences of hu1CD2-1 (SEQ ID NO:95-96). In some embodiments, a CD2 ABM comprises the heavy and light chain variable sequences of hu2CD2-1 (SEQ ID NOS:97-98).

[0537] In other embodiments, a CD2 ABM can comprise the CDR sequences of antibody 9D1 produced by the hybridoma deposited with the Chinese Culture Collection Committee General Microbiology Center on May 16, 2012 with accession no. CGMCC 6132, and which is described in CN102827281A. In other embodiments, a CD2 ABM can comprise the CDR sequences of antibody LO-CD2b produced by the hybridoma deposited with the American Type Culture Collection on Jun. 22, 1999 with accession no. PTA-802, and which is described in US 2003/0139579 A1. In yet other embodiments, a CD2 ABM can comprise the CDR sequences of the CD2 SFv-Ig produced by expression of the construct cloned in the recombinant E. coli deposited with the ATCC on Apr. 9, 1993 with accession no. 69277, and which is described in U.S. Pat. No. 5,795,572.

[0538] In other embodiments, a CD2 ABM can comprise the VH and VL sequences of antibody 9D1. In other embodiments, a CD2 ABM can comprise the VH and VL sequences of antibody LO-CD2b. In yet other embodiments, a CD2 ABM can comprise the VH and VL sequences of the CD2 SFv-Ig produced by expression of the construct cloned in the recombinant E. coli having ATCC accession no. 69277.

[0539] 7.9.2. CD58-Based CD2 ABMs

[0540] In certain aspects, the present disclosure provides a MBM comprising a CD2 ABM which is a ligand. The CD2 ABM specifically binds to human CD2, whose natural ligand is CD58, also known as LFA-3. CD58/LFA-3 proteins are glycoproteins that are expressed on the surfaces of a variety of cell types (Dustin et al., 1991, Annu. Rev. Immunol. 9:27) and play roles in mediating T-cell interactions with APCs in both antigen-dependent and antigen-independent manners (Wallner et al., 1987, J. Exp. Med. 166:923). Accordingly, in certain aspects, the CD2 ABM is a CD58 moiety. As used herein, a CD58 moiety comprises an amino acid sequence comprising at least 70% sequence identity to a CD2-binding portion of CD58, e.g., at least 70%, 71%, 72%, 73%, 74%, 75%, 76%, 77%, 78%, 79%, 80%, 81%, 82%, 83%, 84%, 85%, 86%, 87%, 88%, 89%, 90%, 91%, 92%, 93%, 94%, 95%, 96%, 97%, 98%, or 99% identity to a CD2-binding portion of CD58. The sequence of human CD58 has the Uniprot identifier P19256. It has been established that CD58 fragments containing amino acid residues 30-123 of full length CD58 (i.e., the sequence designated as CD58-4 in Table 14 below) are sufficient for binding to CD2. Wang et al., 1999, Cell 97:791-803. Accordingly, in certain aspects, a CD58 moiety comprises an amino acid sequence comprising at least 70% sequence identity to amino acids 30-123 of CD58, e.g., at least 70%, 71%, 72%, 73%, 74%, 75%, 76%, 77%, 78%, 79%, 80%, 81%, 82%, 83%, 84%, 85%, 86%, 87%, 88%, 89%, 90%, 91%, 92%, 93%, 94%, 95%, 96%, 97%, 98%, or 99% identity to the amino acid sequence designated CD58-4.

[0541] The interactions between CD58 and CD2 have been mapped through x-ray crystallography and molecular modeling. The substitution of residues E25, K29, K30, K32, D33, K34, E37, D84 and K87 (with numbering referring to the in the mature polypeptide) reduces binding to CD2. Ikemizu et al., 1999, Proc. Natl. Acad. Sci. USA 96:4289-94. Accordingly, in preferred embodiments the CD58 moiety retains the wild type residues at E25, K29, K30, K32, D33, K34, E37, D84 and K87.

[0542] In contrast, the following substitutions (with numbering referring to the full length polypeptide) did not impact binding to CD2: F29S; V37K; V49Q; V86K; T113S; and L121G. Accordingly, a CD58 moiety can include one, two, three, four, five or all six of the foregoing substitutions.

[0543] Exemplary CD58 moieties are provided in Table 14 below:

TABLE 14
CD58 sequences

| | | | SEQ ID |
|---|---|---|---|
| Name | Description | Sequence | NO: |
| CD58-1 | Full length | MVAGSDAGRALGVLSVVCLLHCFGFISCFSQQIYGVVYGNVT | SEQ ID |
| | CD58, | FHVPSNVPLKEVLWKKQKDKVAELENSEFRAFSSFKNRVYLD | NO: 99 |
| | including | TVSGSLTIYNLTSSDEDEYEMESPNITDTMKFFLYVLESLPSP | |
| | signal | TLTCALTNGSIEVQCMIPEHYNSHRGLIMYSWDCPMEQCKRN | |
| | sequence | STSIYFKMENDLPQKIQCTLSNPLFNTTSSIILTTCIPSSGHSRH | |
| | (P19256) | RYALIPIPLAVITTCIVLYMNGILKCDRKPDRTNSN | |
| CD58-2 | Extracellular | FSQQIYGVVYGNVTFHVPSNVPLKEVLVVKKQKDKVAELENSE | SEQ ID |
| | domain of | FRAFSSFKNRVYLDTVSGSLTIYNLTSSDEDEYEMESPNITDT | NO: 100 |
| | CD58, | MKFFLYVLESLPSPTLTCALTNGSIEVQCMIPEHYNSHRGLIM | |
| | corresponding | YSVVDCPMEQCKRNSTSIYFKMENDLPQKIQCTLSNPLFNTTS | |
| | to amino acids | SIILTTCIPSSGHSRHR | |
| | 29-215 of | | |
| | CD58 (WT) | | |
| CD58-3 | Extracellular | BSQQIYGVJYGNVTFHVPSNOPLKEVLWKKQKDKVAELENSE | SEQ ID |
| | domain of | FRAFSSFKNRVYLDTUSGSLTIYNLTSSDEDEYEMESPNITDX | NO: 101 |
| | CD58, | MKFFLYVZESLPSPTLTCALTNGSIEVQCMIPEHYNSHRGLIM | |
| | corresponding | YSVVDCPMEQCKRNSTSIYFKMENDLPQKIQCTLSNPLFNTTS | |
| | to amino acids | SIILTTCIPSSGHSRHR | |
| | 29-215 of | B = F or S | |
| | CD58 (with | J = V or K | |
| | permitted | O = V or Q | |
| | substitutions) | U = V or K | |
| | | X = T or S | |
| | | Z = L or G | |
| CD58-4 | Amino acids | SQQIYGVVYGNVTFHVPSNVPLKEVLVVKKQKDKVAELENSEF | SEQ ID |
| | 30-123 (WT) | RAFSSFKNRVYLDTVSGSLTIYNLTSSDEDEYEMESPNITDTM | NO: 102 |
| | | KFFLYVLES | |
| CD58-5 | Amino acids | SQQIYGVJYGNVTFHVPSNOPLKEVLVVKKQKDKVAELENSEF | SEQ ID |
| | 30-123 (with | RAFSSFKNRVYLDTVSGSLTIYNLTSSDEDEYEMESPNITDTM | NO: 103 |
| | permitted | KFFLYVLES | |
| | substitutions) | J = V or K | |
| | | O = V or Q | |

[0544] 7.9.1. CD48-Based CD2 ABMs

[0545] In certain aspects the present disclosure provides a MBM comprising a CD2 ABM which is CD48 moiety. As used herein, a CD48 moiety comprises an amino acid sequence comprising at least 70% sequence identity to a CD2-binding portion of CD48, e.g., at least 70%, 71%, 72%, 73%, 74%, 75%, 76%, 77%, 78%, 79%, 80%,81%, 82%, 83%, 84%, 85%, 86%, 87%, 88%, 89%, 90%, 91%, 92%, 93%, 94%, 95%, 96%, 97%, 98%, or 99% identity to a CD2-binding portion of CD48. The sequence of human CD48 has the Uniprot identifier P09326 (www.uniprot.org/uniprot/P09326), which includes a signal peptide (amino acids 1-26) and a GPI anchor (amino acids 221-243). In certain aspects, a CD48 moiety comprises an amino acid sequence comprising at least 70% sequence identity (e.g., at least 70%, 71%, 72%, 73%, 74%, 75%, 76%, 77%, 78%, 79%, 80%,81%, 82%, 83%, 84%, 85%, 86%, 87%, 88%, 89%, 90%, 91%, 92%, 93%, 94%, 95%, 96%, 97%, 98%, or 99% identity) to the amino acid sequence of consisting of amino acids 27-220 of Uniprot identifier P09326. Human CD48 has an Ig-like C2-type I domain (amino acids 29-127 of Uniprot identifier P09326) and a Ig-like C2 type 2 domain (amino acids 132-212 of Uniprot identifier P09326). Accordingly, in some embodiments, a CD48 moiety comprises an amino acid sequence comprising at least 70% sequence identity (e.g., at least 70%, 71%, 72%, 73%, 74%, 75%, 76%, 77%, 78%, 79%, 80%,81%, 82%, 83%, 84%, 85%, 86%, 87%, 88%, 89%, 90%, 91%, 92%, 93%, 94%, 95%, 96%, 97%, 98%, or 99% identity) to the amino acid sequence of consisting of amino acids 29-212 of Uniprot identifier P09326, to the 02-type I domain (amino acids 29-127 of Uniprot identifier P09326) and/or to the Ig-like C2 type 2 domain (amino acids 132-212 of Uniprot identifier P09326). A CD48 moiety can in some embodiments comprise one or more natural variants relative to the sequence of Uniprot identifier P09326. For example, a CD48 moiety can include a E102Q substitution. As another example, a CD48 moiety can comprise an amino acid sequence corresponding to a CD-48 isoform or a CD2 binding portion thereof, e.g., the isoform having Uniprot identifier P09326-2 or a CD2 binding portion thereof.

### 7.10. Tumor-Associated Antigen ABMs

[0546] The MBMs can comprise at least one ABM that binds specifically to a tumor-associated antigen (TAA). For example, a BBM can comprise an ABM2 that specifically binds a TAA and a TBM can comprise an ABM2 that specifically binds a TAA (“TAA 1”) and an AMB3 that specifically binds different TAA (“TAA 2”). Preferably, the TAA (or each TAA, in the case of TAA 1 and TAA 2) is a human TAA. The antigen may or may not be present on normal cells. In certain embodiments, the TAA is preferentially expressed or upregulated on tumor cells as compared to normal cells. In other embodiments, the TAA is a lineage marker.

[0547] It is anticipated that any type of tumor and any type of TAA can be targeted by the MBMs. Exemplary types of cancers that can be targeted include acute lymphoblastic leukemia, acute myelogenous leukemia, biliary cancer, B-cell leukemia, B-cell lymphoma, biliary cancer, bone cancer, brain cancer, breast cancer, triple-negative breast cancer, cervical cancer, Burkitt lymphoma, chronic lymphocytic leukemia, chronic myelogenous leukemia, colorectal cancer, endometrial cancer, esophageal cancer, gall bladder cancer, gastric cancer, gastrointestinal tract cancer, glioma, hairy cell leukemia, head and neck cancer, Hodgkin's lymphoma, liver cancer, lung cancer, medullary thyroid cancer, melanoma, multiple myeloma, ovarian cancer, non-Hodgkin's lymphoma, pancreatic cancer, prostate cancer, pulmonary tract cancer, renal cancer, sarcoma, skin cancer, testicular cancer, urothelial cancer, and other urinary bladder cancers. However, the skilled artisan will realize that TAAs are known for virtually any type of cancer.

[0548] Exemplary types of B cell malignancies that may be targeted include Hodgkin's lymphomas, non-Hodgkin's lymphomas (NHLs), and multiple myeloma. Examples of NHLs include diffuse large B-cell lymphoma (DLBCL), follicular lymphoma, chronic lymphocytic leukemia (CLL)/small lymphocytic lymphoma (SLL), mantle cell lymphoma (MCL), marginal zone lymphomas, Burkitt lymphoma, lymphoplasmacytic lymphoma (Waldenstrom macroglobulinemia), hairy cell leukemia, primary central nervous system (CNS) lymphoma, primary mediastinal large B-cell lymphoma, mediastinal grey-zone lymphoma (MGZL), splenic marginal zone B-cell lymphoma, extranodal marginal zone B-cell lymphoma of MALT, nodal marginal zone B-cell lymphoma, and primary effusion lymphoma.

[0549] Exemplary TAAs for which a MBM can be created (e.g., targeted by ABM2 and/or ABM3) include ABCF1; ACVR1; ACVR1B; ACVR2; ACVR2B; ACVRL1; ADORA2A; ADRB3; Aggrecan; AGR2; AICDA; AIF1; AIG1; AKAP1; AKAP2; ALK; AMH; AMHR2; ANGPT1; ANGPT2; ANGPTL3; ANGPTL4; ANPEP; APC; APOC1; AR; AZGP1 (zinc-a-glycoprotein); B7.1; B7.2; BAD; BAFF; BAG1; BAI1; BCL2; BCL6; BDNF; BLNK; BLR1 (MDR15); BlyS; BMP1; BMP2; BMP3B (GDF10); BMP4; BMP6; BMP8; BMPR1A; BMPR1B; BMPR2; BPAG1 (plectin); BRCA1; C19orf10 (IL27w); C3; C4A; C5; C5R1; Cadherin 17; CANT1; CASP1; CASP4; CAV1; CCBP2 (D6/JAB61); CCL1 (1-309); CCL11 (eotaxin); CCL13 (MCP-4); CCL15 (MIP-1d); CCL16 (HCC-4); CCL17 (TARC); CCL18 (PARC); CCL19 (MIP-3b); CCL2 (MCP-1); MCAF; CCL20 (MIP-3a); CCL21 (MIP-2); SLC; exodus-2; CCL22 (MDC/STC-1); CCL23 (MPIF-1); CCL24 (MPIF-2/eotaxin-2); CCL25 (TECK); CCL26 (eotaxin-3); CCL27 (CTACK/ILC); CCL28; CCL3 (MIP-1a); CCL4 (MIP-1b); CCL5 (RANTES); CCL7 (MCP-3); CCL8 (mcp-2); CCNA1; CCNA2; CCND1; CCNE1; CCNE2; CCR1 (CKR1/HM145); CCR2 (mcp-1RB/RA); CCR3 (CKR3/CMKBR3); CCR4; CCR5 (CMKBR5/ChemR13); CCR6 (CMKBR6/CKR-L3/STRL22/DRY6); CCR7 (CKR7/EBI1); CCR8 (CMKBR8/TER1/CKR-L1); CCR9 (GPR-9-6); CCRL1 (VSHK1); CCRL2 (L-CCR); CD164; CD19; CD1C; CD20; CD200; CD-22; CD24; CD28; CD3; CD37; CD38; CD3E; CD3G; CD3Z; CD4; CD32b; CD40; CD40L; CD44; CD45RB; CD52; CD69; CD72; CD74; CD79A; CD79B; CD8; CD80; CD81; CD83; CD86; CD97; CD179a; CDH1 (E-cadherin); CDH10; CDH12; CDH13; CDH18; CDH19; CDH20; CDH5; CDH7; CDH8; CDH9; CDK2; CDK3; CDK4; CDK5; CDK6; CDK7; CDK9; CDKN1A (p21Wap1/Cip1); CDKN1B (p27Kip1); CDKN1C; CDKN2A (p16INK4a); CDKN2B; CDKN2C; CDKN3; CEBPB; CER1; CHGA; CHGB; Chitinase; CHST10; CKLFSF2; CKLFSF3; CKLFSF4; CKLFSF5; CKLFSF6; CKLFSF7; CKLFSF8; CLDN3; CLDN6; CLDN7 (claudin-7); CLN3; CLU (clusterin); CMKLR1; CMKOR1 (RDC1); CNR1; COL18A1; COL1A1; COL4A3; COL6A1; CR2; CRP; CSF1 (M-CSF); CSF2 (GM-CSF); CSF3 (GCSF); CTLA4; CTNNB1 (b-catenin); CTSB (cathepsin B); CX3CL1 (SCYD1); CX3CR1 (V28); CXCL1 (GRO1); CXCL10(IP-10); CXCL11 (1-TAC/IP-9); CXCL12 (SDF1); CXCL13; CXCL14; CXCL16; CXCL2 (GRO2); CXCL3 (GRO3); CXCL5 (ENA-78/LIX); CXCL6 (GCP-2); CXCL9 (MIG); CXCR3 (GPR9/CKR-L2); CXCR4; CXCR6 (TYMSTR/STRL33/Bonzo); CYB5; CYC1; CYSLTR1; CGRP; C1q; C1r; C1; C4a; C4b; C2a; C2b; C3a; C3b; DAB21P; DES; DKFZp451J0118; DNCL1; DPP4; E-selectin; E2F1; ECGF1; EDG1; EFNA1; EFNA3; EFNB2; EGF; EGFR; EGFRvIII; ELAC2; ENG; ENO1; ENO2; ENO3; EPHB4; EPO; ERBB2 (Her-2); EREG; ERK8; ESR1; ESR2; F3 (TF); Factor VII; Factor IX; Factor V; Factor VIIa; Factor Factor X; Factor XII; Factor XIII; FADD; FasL; FASN; FCER1A; FCER2; Fc gamma receptor; FCGR3A; FCRL5; FGF; FGF1 (aFGF); FGF10; FGF11; FGF12; FGF12B; FGF13; FGF14; FGF16; FGF17; FGF18; FGF19; FGF2 (bFGF); FGF20; FGF21; FGF22; FGF23; FGF3 (int-2); FGF4 (HST); FGF5; FGF6 (HST-2); FGF7 (KGF); FGF8; FGF9; FGFR3; FIGF (VEGFD); FIL1 (EPSILON); FIL1 (ZETA); FLJ12584; FLJ25530; FLRT1 (fibronectin); FLT1; Folate receptor alpha; Folate receptor beta; FOS; FOSL1 (FRA-1); Fucosyl GM1; FY (DARC); GABRP (GABAa); GAGEB1; GAGEC1; GALNAC4S-6ST; GATA3; GDF5; GFI1; GGT1; GM-CSF; GloboH; GNAS1; GNRH1; GPNMB; GPR2 (CCR10); GPR20; GPR31; GPR44; GPR64; GPR81 (FKSG80); GPRC5D; GRCC10 (010); GRP; GSN (Gelsolin); GSTP1; glycoprotein (gP)IIb/IIIa; HAVCR1; HAVCR2; HDAC4; HDAC5; HDAC7A; HDAC9; Her2; HER3; HGF; HIF1A; HIP1; histamine and histamine receptors; HLA-A; HLA-DRA; HM74; HMGB1; HMOX1; HMWMAA; HUMCYT2A; ICEBERG; ICOSL; ID2; IFN-a; IFNA1; IFNA2; IFNA4; IFNA5; IFNA6; IFNA7; IFNB1; IFN-γ; IFNW1; IGBP1; IGF1; IGF1R; IGF2; IGFBP2; IGFBP3; IGFBP6; IL-1; IL-α; IL-1-β; IL10; IL10 RA; IL10RB; IL11; IL11 RA; IL-12; IL12A; IL12B; IL12RB1; IL12RB2; IL13; IL13RA1; IL13RA2; IL14; IL15; IL15RA; IL16; IL17; IL17B; IL17C; IL17R; IL18; IL18BP; IL18R1; IL18RAP; IL19; IL1A; IL1B; IL1F10; IL1F5; IL1F6; IL1F7; IL1F8; IL1F9; IL1HY1; IL1R1; IL1R2; IL1RAP; IL1RAPL1; IL1RAPL2; IL1RL1; IL1RL2; IL1RN; IL2; IL20; IL20RA; IL21R; IL22; IL22R; IL22RA2; IL23; IL24; IL25; IL26; IL27; IL28A; IL28B; IL29; IL2RA; IL2RB; IL2RG; IL3; IL30; IL3RA; IL4; IL4R; IL5; IL5RA; IL6; IL6R; IL6ST (glycoprotein 130); IL7; IL7R; IL8; IL8RA; IL8RB; IL8RB; IL9; IL9R; ILK; INHA; INHBA; INSL3; INSL4; IRAK1; IRAK2; ITGA1; ITGA2; ITGA3; ITGA6 (a6 integrin); ITGAV; ITGB3; ITGB4 (b 4 integrin); JAG1; JAK1; JAK3; JUN; K6HF; KAI1; KDR; KITLG; KLF5 (GC Box BP); KLF6; KLK10; KLK12; KLK13; KLK14; KLK15; KLK3; KLK4; KLK5; KLK6; KLK9; KRT1; KRT19 (Keratin 19); KRT2A; KRTHB6 (hair-specific type II keratin); L-selectin; LAMAS; LEP (leptin); Lingo-p75; Lingo-Troy; LRP6; LPS; LTA (TNF-b); LTB; LTB4R (GPR16); LTB4R2; LTBR; LY6K; LYPD8; MACMARCKS; MAG or Omgp; MAP2K7 (c-Jun); MDK; mesothelin; MIB1; midkine; MIF; MIP-2; MKI67 (Ki-67); MMP2; MMP9; MS4A1; MSMB; MT3 (metallothionectin-III); MTSS1; MUC1 (mucin); MYC; MYD88; NCK2; neurocan; NKG2D; NFKB1; NFKB2; NGF; NGFB (NGF); NGFR; NgR-Lingo; NgR-Nogo66 (Nogo); NgR-p75; NgR-Troy; NME1 (NM23A); NOX5; NPPB; NROB1; NROB2; NR1D1; NR1D2; NR1H2; NR1H3; NR1H4; NRII2; NRII3; NR2C1; NR2C2; NR2E1; NR2E3; NR2F1; NR2F2; NR2F6; NR3C1; NR3C2; NR4A1; NR4A2; NR4A3; NR5A1; NR5A2; NR6A1; NRP1; NRP2; NT5E; NTN4; NY-BR-1; o-acetyl-GD2; ODZ1; OPRD1; OR51E2; P2RX7; PANX3; PAP; PART1; PATE; PAWR; PCA3; PCNA; PDGFA; PDGFB; PECAM1; PF4 (CXCL4); PGE2; PGF; PGR; phosphacan; PIAS2; PIK3CG; PLAC1; plasminogen activator; PLAU (uPA); PLG; PLXDC1; polysialic acid; PPBP (CXCL7); PPID; PR1; PRKCQ; PRKD1; PRL; PROC; Protein C; PROK2; PSAP; PSCA; PTAFR; PTEN; PTGS2 (COX-2); PTN; RAC2 (p21Rac2); RAGE; RARB; RGS1; RGS13; RGS3; RNF110 (ZNF144); ROBO2; SIO0A2; SCGB1D2 (lipophilin B); SCGB2A1 (mammaglobin 2); SCGB2A2 (mammaglobin 1); SCYE1 (endothelial Monocyte-activating cytokine); SDF2; SERPINA1; SERPINA3; SERPINB5 (maspin); SERPINE1 (PAI-1); SERPINF1; SHBG; SLA2; SLC2A2; SLC33A1; SLC34A2; SLC39A6; SLC43A1; SLIT2; SLITRK6; SPP1; SPRR1B (Spr1); ST6GAL1; STAB1; STATE; STEAP; STEAP2; substance P; TACSTD2; TB4R2; TBX21; TCP10; TDGF1; TEK; TEM1/CD248; TEM7R; TGFA; TGFB1; TGFB111; TGFB2; TGFB3; TGFBI; TGFBR1; TGFBR2; TGFBR3; TH1L; THBS1 (thrombospondin-1); THBS2; THBS4; THPO; TIE (Tie-1); TIMP3; tissue factor; TLR10; TLR2; TLR3; TLR4; TLR5; TLR6; TLR7; TLR8; TLR9; TNF; TNF-α; TNFAIP2 (B94); TNFAIP3; TNFRSF11A; TNFRSF1A; TNFRSF1B; TNFRSF21; TNFRSF5; TNFRSF6 (Fas); TNFRSF7; TNFRSF8; TNFRSF9; TNFSF10 (TRAIL); TNFSF11 (TRANCE); TNFSF12 (APO3L); TNFSF13 (April); TNFSF13B; TNFSF14 (HVEM-L); TNFSF15 (VEGI); TNFSF18; TNFSF4 (OX40 ligand); TNFSF5 (CD40 ligand); TNFSF6 (FasL); TNFSF7 (CD27 ligand); TNFSF8 (CD30 ligand); TNFSF9 (4-1BB ligand); TOLLIP; Toll-like receptors; TOP2A (topoisomerase ha); TP53; TPM1; TPM2; TRADD; TRAF1; TRAF2; TRAF3; TRAF4; TRAF5; TRAF6; TREM1; TREM2; TRPC6; TSHR; TSLP; TWEAK; thrombomodulin; thrombin; UPK2; VEGF; VEGFB; VEGFC; versican; VHL C5; VLA-4; XCL1 (lymphotactin); XCL2 (SCM-1b); XCR1 (GPRS/CCXCR1); YY1; and ZFPM2.

[0550] In some embodiments, a TAA targeted by a MBM is ADRB3. In some embodiments, a TAA targeted by a MBM is AKAP-4. In some embodiments, a TAA targeted by a MBM is ALK. In some embodiments, a TAA targeted by a MBM is androgen receptor. In some embodiments, a TAA targeted by a MBM is B7H3. In some embodiments, a TAA targeted by a MBM is BCMA. In some embodiments, a TAA targeted by a MBM is BORIS. In some embodiments, a TAA targeted by a MBM is BST2. In some embodiments, a TAA targeted by a MBM is Cadherin17. In some embodiments, a TAA targeted by a MBM is CAIX. In some embodiments, a TAA targeted by a MBM is CD171. In some embodiments, a TAA targeted by a MBM is CD179a. In some embodiments, a TAA targeted by a MBM is CD19. In some embodiments, a TAA targeted by a MBM is CD20. In some embodiments, a TAA targeted by a MBM is CD22. In some embodiments, a TAA targeted by a MBM is CD24. In some embodiments, a TAA targeted by a MBM is CD30. In some embodiments, a TAA targeted by a MBM is CD300LF. In some embodiments, a TAA targeted by a MBM is CD32b. In some embodiments, a TAA targeted by a MBM is CD33. In some embodiments, a TAA targeted by a MBM is CD38. In some embodiments, a TAA targeted by a MBM is CD44v6. In some embodiments, a TAA targeted by a MBM is CD72. In some embodiments, a TAA targeted by a MBM is CD79a. In some embodiments, a TAA targeted by a MBM is CD79b. In some embodiments, a TAA targeted by a MBM is CD97. In some embodiments, a TAA targeted by a MBM is CEA. In some embodiments, a TAA targeted by a MBM is CLDN6. In some embodiments, a TAA targeted by a MBM is CLEC12A. In some embodiments, a TAA targeted by a MBM is CLL-1. In some embodiments, a TAA targeted by a MBM is CS-1. In some embodiments, a TAA targeted by a MBM is CXORF61. In some embodiments, a TAA targeted by a MBM is Cyclin B1. In some embodiments, a TAA targeted by a MBM is CYP1B1. In some embodiments, a TAA targeted by a MBM is EGFR. In some embodiments, a TAA targeted by a MBM is EGFRvIII. In some embodiments, a TAA targeted by a MBM is EMR2. In some embodiments, a TAA targeted by a MBM is EPCAM. In some embodiments, a TAA targeted by a MBM is EphA2. In some embodiments, a TAA targeted by a MBM is EphB2. In some embodiments, a TAA targeted by a MBM is ERBB2. In some embodiments, a TAA targeted by a MBM is ERG (TMPRSS2 ETS fusion gene). In some embodiments, a TAA targeted by a MBM is ETV6-AML. In some embodiments, a TAA targeted by a MBM is FAP. In some embodiments, a TAA targeted by a MBM is FCAR. In some embodiments, a TAA targeted by a MBM is FCRL5. In some embodiments, a TAA targeted by a MBM is FLT3. In some embodiments, a TAA targeted by a MBM is FLT3. In some embodiments, a TAA targeted by a MBM is folate receptor alpha. In some embodiments, a TAA targeted by a MBM is folate receptor beta. In some embodiments, a TAA targeted by a MBM is Fos-related antigen 1. In some embodiments, a TAA targeted by a MBM is fucosyl GM1. In some embodiments, a TAA targeted by a MBM is GD2. In some embodiments, a TAA targeted by a MBM is GD2. In some embodiments, a TAA targeted by a MBM is GD3. In some embodiments, a TAA targeted by a MBM is GloboH. In some embodiments, a TAA targeted by a MBM is GM3. In some embodiments, a TAA targeted by a MBM is gp100Tn. In some embodiments, a TAA targeted by a MBM is GPC3. In some embodiments, a TAA targeted by a MBM is GPNMB. In some embodiments, a TAA targeted by a MBM is GPR20. In some embodiments, a TAA targeted by a MBM is GPRC5D. In some embodiments, a TAA targeted by a MBM is GPR64. In some embodiments, a TAA targeted by a MBM is HAVCR1. In some embodiments, a TAA targeted by a MBM is HER3. In some embodiments, a TAA targeted by a MBM is HMWMAA. In some embodiments, a TAA targeted by a MBM is hTERT. In some embodiments, a TAA targeted by a MBM is Igf-I receptor. In some embodiments, a TAA targeted by a MBM is IGLL1. In some embodiments, a TAA targeted by a MBM is IL-11Ra. In some embodiments, a TAA targeted by a MBM is IL-13Ra2. In some embodiments, a TAA targeted by a MBM is KIT. In some embodiments, a TAA targeted by a MBM is LAIR1. In some embodiments, a TAA targeted by a MBM is LCK. In some embodiments, a TAA targeted by a MBM is LewisY. In some embodiments, a TAA targeted by a MBM is LILRA2. In some embodiments, a TAA targeted by a MBM is LMP2. In some embodiments, a TAA targeted by a MBM is LRP6. In some embodiments, a TAA targeted by a MBM is LY6K. In some embodiments, a TAA targeted by a MBM is LY75. In some embodiments, a TAA targeted by a MBM is LYPD8. In some embodiments, a TAA targeted by a MBM is MAD-CT-1. In some embodiments, a TAA targeted by a MBM is MAD-CT-2. In some embodiments, a TAA targeted by a MBM is mesothelin. In some embodiments, a TAA targeted by a MBM is ML-IAP. In some embodiments, a TAA targeted by a MBM is MUC1. In some embodiments, a TAA targeted by a MBM is MYCN. In some embodiments, a TAA targeted by a MBM is NA17. In some embodiments, a TAA targeted by a MBM is NCAM. In some embodiments, a TAA targeted by a MBM is NKG2D. In some embodiments, a TAA targeted by a MBM is NY-BR-1. In some embodiments, a TAA targeted by a MBM is o-acetyl-GD2. In some embodiments, a TAA targeted by a MBM is OR51E2. In some embodiments, a TAA targeted by a MBM is OY-TES1. In some embodiments, a TAA targeted by a MBM is a p53 mutant. In some embodiments, a TAA targeted by a MBM is PANX3. In some embodiments, a TAA targeted by a MBM is PAX3. In some embodiments, a TAA targeted by a MBM is PAX5. In some embodiments, a TAA targeted by a MBM is PDGFR-beta. In some embodiments, a TAA targeted by a MBM is PLAC1. In some embodiments, a TAA targeted by a MBM is polysialic acid. In some embodiments, a TAA targeted by a MBM is PRSS21. In some embodiments, a TAA targeted by a MBM is PSCA. In some embodiments, a TAA targeted by a MBM is RhoC. In some embodiments, a TAA targeted by a MBM is ROR1. In some embodiments, a TAA targeted by a MBM is a sarcoma translocation breakpoint protein. In some embodiments, a TAA targeted by a MBM is SART3. In some embodiments, a TAA targeted by a MBM is SLC34A2. In some embodiments, a TAA targeted by a MBM is SLC39A6. In some embodiments, a TAA targeted by a MBM is sLe. In some embodiments, a TAA targeted by a MBM is SLITRK6. In some embodiments, a TAA targeted by a MBM is sperm protein 17. In some embodiments, a TAA targeted by a MBM is SSEA-4. In some embodiments, a TAA targeted by a MBM is SSX2. In some embodiments, a TAA targeted by a MBM is TAAG72. In some embodiments, a TAA targeted by a MBM is TAARP. In some embodiments, a TAA targeted by a MBM is TACSTD2. In some embodiments, a TAA targeted by a MBM is TEM1/CD248. In some embodiments, a TAA targeted by a MBM is TEM7R. In some embodiments, a TAA targeted by a MBM is TGS5. In some embodiments, a TAA targeted by a MBM is Tie 2. In some embodiments, a TAA targeted by a MBM is Tn Ag. In some embodiments, a TAA targeted by a MBM is TSHR. In some embodiments, a TAA targeted by a MBM is tyrosinase. In some embodiments, a TAA targeted by a MBM is UPK2. In some embodiments, a TAA targeted by a MBM is VEGFR2. In some embodiments, a TAA targeted by a MBM is WT1. In some embodiments, a TAA targeted by a MBM is XAGE1.

[0551] In some embodiments, a TAA targeted by a MBM is selected from BCMA, CD19, CD20, CD22, CD123, CD33, CLL1, CD138 (also known as Syndecan-1, SDC1), CS1, CD38, CD133, FLT3, CD52, TNFRSF13C (TNF Receptor Superfamily Member 13C, also known as BAFFR: B-Cell-Activating Factor Receptor), TNFRSF13B (TNF Receptor Superfamily Member 13B, also known as TACI: Transmembrane Activator And CAML Interactor), CXCR4 (C-X-C Motif Chemokine Receptor 4), PD-L1 (programmed death-ligand 1), LY9 (lymphocyte antigen 9, also known as CD229), CD200, FCGR2B (Fc fragment of IgG receptor IIb, also known as CD32b), CD21, CD23, CD24, CD40L, CD72, CD79a, and CD79b.

[0552] In some embodiments a TAA targeted by a MBM is CD19. In some embodiments, a TAA targeted by a MBM is BCMA. In some embodiments, a TAA targeted by a MBM is CD20. In some embodiments, a TAA targeted by a MBM is CD22. In some embodiments, a TAA targeted by a MBM is CD123. In some embodiments, a TAA targeted by a MBM is CD33. In some embodiments, a TAA targeted by a MBM is CLL1. In some embodiments, a TAA targeted by a MBM is CD138. In some embodiments, a TAA targeted by a MBM is CS1. In some embodiments, a TAA targeted by a MBM is CD38. In some embodiments, a TAA targeted by a MBM is CD133. In some embodiments, a TAA targeted by a MBM is FLT3. In some embodiments, a TAA targeted by a MBM is CD52. In some embodiments, a TAA targeted by a MBM is TNFRSF13C. In some embodiments, a TAA targeted by a MBM is TNFRSF13B. In some embodiments, a TAA targeted by a MBM is CXCR4. In some embodiments, a TAA targeted by a MBM is PD-L1. In some embodiments, a TAA targeted by a MBM is LY9. In some embodiments, a TAA targeted by a MBM is CD200. In some embodiments, a TAA targeted by a MBM is CD21. In some embodiments, a TAA targeted by a MBM is CD23. In some embodiments, a TAA targeted by a MBM is CD24. In some embodiments, a TAA targeted by a MBM is CD40L. In some embodiments, a TAA targeted by a MBM is CD72. In some embodiments, a TAA targeted by a MBM is CD79a. In some embodiments, a TAA targeted by a MBM is CD79b.

[0553] In some embodiments, a MBM targets two TAAs (TAA 1 and TAA 2) selected from the TAAs described in this Section.

[0554] In some embodiments, TAA 1 is CD19 and TAA 2 is CD20 (or vice versa). In some embodiments, TAA 1 is CD19 and TAA 2 is CD22 (or vice versa). In some embodiments, TAA 1 is CD19 and TAA 2 is CD123 (or vice versa). In some embodiments, TAA 1 is CD19 and TAA 2 is BCMA (or vice versa). In some embodiments, TAA 1 is CD19 and TAA 2 is CD33 (or vice versa). In some embodiments, TAA 1 is CD19 and TAA 2 is CLL1 (or vice versa). In some embodiments, TAA 1 is CD19 and TAA 2 is CD138 (or vice versa). In some embodiments, TAA 1 is CD19 and TAA 2 is CS1 (or vice versa). In some embodiments, TAA 1 is CD19 and TAA 2 is CD38 (or vice versa). In some embodiments, TAA 1 is CD19 and TAA 2 is CD133 (or vice versa). In some embodiments, TAA 1 is CD19 and TAA 2 is FLT3 (or vice versa). In some embodiments, TAA 1 is CD19 and TAA 2 is CD52 (or vice versa). In some embodiments, TAA 1 is CD19 and TAA 2 is TNFRSF13C (or vice versa). In some embodiments, TAA 1 is CD19 and TAA 2 is TNFRSF13B (or vice versa). In some embodiments, TAA 1 is CD19 and TAA 2 is CXCR4 (or vice versa). In some embodiments, TAA 1 is CD19 and TAA 2 is PD-L1 (or vice versa). In some embodiments, TAA 1 is CD19 and TAA 2 is LY9 (or vice versa). In some embodiments, TAA 1 is CD19 and TAA 2 is CD200 (or vice versa). In some embodiments, TAA 1 is CD19 and TAA 2 is FCGR2B (or vice versa). In some embodiments, TAA 1 is CD19 and TAA 2 is CD21 (or vice versa). In some embodiments, TAA 1 is CD19 and TAA 2 is CD23 (or vice versa). In some embodiments, TAA 1 is CD19 and TAA 2 is CD24 (or vice versa). In some embodiments, TAA 1 is CD19 and TAA 2 is CD40L (or vice versa). In some embodiments, TAA 1 is CD19 and TAA 2 is CD72 (or vice versa). In some embodiments, TAA 1 is CD19 and TAA 2 is CD79a (or vice versa). In some embodiments, TAA 1 is CD19 and TAA 2 is CD79b (or vice versa). In some embodiments, TAA 1 is CD20 and TAA 2 is CD22 (or vice versa). In some embodiments, TAA 1 is CD20 and TAA 2 is CD123 (or vice versa). In some embodiments, TAA 1 is CD20 and TAA 2 is BCMA (or vice versa). In some embodiments, TAA 1 is CD20 and TAA 2 is CD33 (or vice versa). In some embodiments, TAA 1 is CD20 and TAA 2 is CLL1 (or vice versa). In some embodiments, TAA 1 is CD20 and TAA 2 is CD138 (or vice versa). In some embodiments, TAA 1 is CD20 and TAA 2 is CS1 (or vice versa). In some embodiments, TAA 1 is CD20 and TAA 2 is CD38 (or vice versa). In some embodiments, TAA 1 is CD20 and TAA 2 is CD133 (or vice versa). In some embodiments, TAA 1 is CD20 and TAA 2 is FLT3 (or vice versa). In some embodiments, TAA 1 is CD20 and TAA 2 is CD52 (or vice versa). In some embodiments, TAA 1 is CD20 and TAA 2 is TNFRSF13C (or vice versa). In some embodiments, TAA 1 is CD20 and TAA 2 is TNFRSF13B (or vice versa). In some embodiments, TAA 1 is CD20 and TAA 2 is CXCR4 (or vice versa). In some embodiments, TAA 1 is CD20 and TAA 2 is PD-L1 (or vice versa). In some embodiments, TAA 1 is CD20 and TAA 2 is LY9 (or vice versa). In some embodiments, TAA 1 is CD20 and TAA 2 is CD200 (or vice versa). In some embodiments, TAA 1 is CD20 and TAA 2 is FCGR2B (or vice versa). In some embodiments, TAA 1 is CD20 and TAA 2 is CD21 (or vice versa). In some embodiments, TAA 1 is CD20 and TAA 2 is CD23 (or vice versa). In some embodiments, TAA 1 is CD20 and TAA 2 is CD24 (or vice versa). In some embodiments, TAA 1 is CD20 and TAA 2 is CD40L (or vice versa). In some embodiments, TAA 1 is CD20 and TAA 2 is CD72 (or vice versa). In some embodiments, TAA 1 is CD20 and TAA 2 is CD79a (or vice versa). In some embodiments, TAA 1 is CD20 and TAA 2 is CD79b (or vice versa). In some embodiments, TAA 1 is CD22 and TAA 2 is CD123 (or vice versa). In some embodiments, TAA 1 is CD22 and TAA 2 is BCMA (or vice versa). In some embodiments, TAA 1 is CD22 and TAA 2 is CD33 (or vice versa). In some embodiments, TAA 1 is CD22 and TAA 2 is CLL1 (or vice versa). In some embodiments, TAA 1 is CD22 and TAA 2 is CD138 (or vice versa). In some embodiments, TAA 1 is CD22 and TAA 2 is CS1 (or vice versa). In some embodiments, TAA 1 is CD22 and TAA 2 is CD38 (or vice versa). In some embodiments, TAA 1 is CD22 and TAA 2 is CD133 (or vice versa). In some embodiments, TAA 1 is CD22 and TAA 2 is FLT3 (or vice versa). In some embodiments, TAA 1 is CD22 and TAA 2 is CD52 (or vice versa). In some embodiments, TAA 1 is CD22 and TAA 2 is TNFRSF13C (or vice versa). In some embodiments, TAA 1 is CD22 and TAA 2 is TNFRSF13B (or vice versa). In some embodiments, TAA 1 is CD22 and TAA 2 is CXCR4 (or vice versa). In some embodiments, TAA 1 is CD22 and TAA 2 is PD-L1 (or vice versa). In some embodiments, TAA 1 is CD22 and TAA 2 is LY9 (or vice versa). In some embodiments, TAA 1 is CD22 and TAA 2 is CD200 (or vice versa). In some embodiments, TAA 1 is CD22 and TAA 2 is FCGR2B (or vice versa). In some embodiments, TAA 1 is CD22 and TAA 2 is CD21 (or vice versa). In some embodiments, TAA 1 is CD22 and TAA 2 is CD23 (or vice versa). In some embodiments, TAA 1 is CD22 and TAA 2 is CD24 (or vice versa). In some embodiments, TAA 1 is CD22 and TAA 2 is CD40L (or vice versa). In some embodiments, TAA 1 is CD22 and TAA 2 is CD72 (or vice versa). In some embodiments, TAA 1 is CD22 and TAA 2 is CD79a (or vice versa). In some embodiments, TAA 1 is CD22 and TAA 2 is CD79b (or vice versa). In some embodiments, TAA 1 is CD123 and TAA 2 is BCMA (or vice versa). In some embodiments, TAA 1 is CD123 and TAA 2 is CD33 (or vice versa). In some embodiments, TAA 1 is CD123 and TAA 2 is CLL1 (or vice versa). In some embodiments, TAA 1 is CD123 and TAA 2 is CD138 (or vice versa). In some embodiments, TAA 1 is CD123 and TAA 2 is CS1 (or vice versa). In some embodiments, TAA 1 is CD123 and TAA 2 is CD38 (or vice versa). In some embodiments, TAA 1 is CD123 and TAA 2 is CD133 (or vice versa). In some embodiments, TAA 1 is CD123 and TAA 2 is FLT3 (or vice versa). In some embodiments, TAA 1 is CD123 and TAA 2 is CD52 (or vice versa). In some embodiments, TAA 1 is CD123 and TAA 2 is TNFRSF13C (or vice versa). In some embodiments, TAA 1 is CD123 and TAA 2 is TNFRSF13B (or vice versa). In some embodiments, TAA 1 is CD123 and TAA 2 is CXCR4 (or vice versa). In some embodiments, TAA 1 is CD123 and TAA 2 is PD-L1 (or vice versa). In some embodiments, TAA 1 is CD123 and TAA 2 is LY9 (or vice versa). In some embodiments, TAA 1 is CD123 and TAA 2 is CD200 (or vice versa). In some embodiments, TAA 1 is CD123 and TAA 2 is FCGR2B (or vice versa). In some embodiments, TAA 1 is CD123 and TAA 2 is CD21 (or vice versa). In some embodiments, TAA 1 is CD123 and TAA 2 is CD23 (or vice versa). In some embodiments, TAA 1 is CD123 and TAA 2 is CD24 (or vice versa). In some embodiments, TAA 1 is CD123 and TAA 2 is CD40L (or vice versa). In some embodiments, TAA 1 is CD123 and TAA 2 is CD72 (or vice versa). In some embodiments, TAA 1 is CD123 and TAA 2 is CD79a (or vice versa). In some embodiments, TAA 1 is CD123 and TAA 2 is CD79b (or vice versa). In some embodiments, TAA 1 is BCMA and TAA 2 is CD33 (or vice versa). In some embodiments, TAA 1 is BCMA and TAA 2 is CLL1 (or vice versa). In some embodiments, TAA 1 is BCMA and TAA 2 is CD138 (or vice versa). In some embodiments, TAA 1 is BCMA and TAA 2 is CS1 (or vice versa). In some embodiments, TAA 1 is BCMA and TAA 2 is CD38 (or vice versa). In some embodiments, TAA 1 is BCMA and TAA 2 is CD133 (or vice versa). In some embodiments, TAA 1 is BCMA and TAA 2 is FLT3 (or vice versa). In some embodiments, TAA 1 is BCMA and TAA 2 is CD52 (or vice versa). In some embodiments, TAA 1 is BCMA and TAA 2 is TNFRSF13C (or vice versa). In some embodiments, TAA 1 is BCMA and TAA 2 is TNFRSF13B (or vice versa). In some embodiments, TAA 1 is BCMA and TAA 2 is CXCR4 (or vice versa). In some embodiments, TAA 1 is BCMA and TAA 2 is PD-L1 (or vice versa). In some embodiments, TAA 1 is BCMA and TAA 2 is LY9 (or vice versa). In some embodiments, TAA 1 is BCMA and TAA 2 is CD200 (or vice versa). In some embodiments, TAA 1 is BCMA and TAA 2 is FCGR2B (or vice versa). In some embodiments, TAA 1 is BCMA and TAA 2 is CD21 (or vice versa). In some embodiments, TAA 1 is BCMA and TAA 2 is CD23 (or vice versa). In some embodiments, TAA 1 is BCMA and TAA 2 is CD24 (or vice versa). In some embodiments, TAA 1 is BCMA and TAA 2 is CD40L (or vice versa). In some embodiments, TAA 1 is BCMA and TAA 2 is CD72 (or vice versa). In some embodiments, TAA 1 is BCMA and TAA 2 is CD79a (or vice versa). In some embodiments, TAA 1 is BCMA and TAA 2 is CD79b (or vice versa). In some embodiments, TAA 1 is CD33 and TAA 2 is CLL1 (or vice versa). In some embodiments, TAA 1 is CD33 and TAA 2 is CD138 (or vice versa). In some embodiments, TAA 1 is CD33 and TAA 2 is CS1 (or vice versa). In some embodiments, TAA 1 is CD33 and TAA 2 is CD38 (or vice versa). In some embodiments, TAA 1 is CD33 and TAA 2 is CD133 (or vice versa). In some embodiments, TAA 1 is CD33 and TAA 2 is FLT3 (or vice versa). In some embodiments, TAA 1 is CD33 and TAA 2 is CD52 (or vice versa). In some embodiments, TAA 1 is CD33 and TAA 2 is TNFRSF13C (or vice versa). In some embodiments, TAA 1 is CD33 and TAA 2 is TNFRSF13B (or vice versa). In some embodiments, TAA 1 is CD33 and TAA 2 is CXCR4 (or vice versa). In some embodiments, TAA 1 is CD33 and TAA 2 is PD-L1 (or vice versa). In some embodiments, TAA 1 is CD33 and TAA 2 is LY9 (or vice versa). In some embodiments, TAA 1 is CD33 and TAA 2 is CD200 (or vice versa). In some embodiments, TAA 1 is CD33 and TAA 2 is FCGR2B (or vice versa). In some embodiments, TAA 1 is CD33 and TAA 2 is CD21 (or vice versa). In some embodiments, TAA 1 is CD33 and TAA 2 is CD23 (or vice versa). In some embodiments, TAA 1 is CD33 and TAA 2 is CD24 (or vice versa). In some embodiments, TAA 1 is CD33 and TAA 2 is CD40L (or vice versa). In some embodiments, TAA 1 is CD33 and TAA 2 is CD72 (or vice versa). In some embodiments, TAA 1 is CD33 and TAA 2 is CD79a (or vice versa). In some embodiments, TAA 1 is CD33 and TAA 2 is CD79b (or vice versa). In some embodiments, TAA 1 is CLL1 and TAA 2 is CD138 (or vice versa). In some embodiments, TAA 1 is CLL1 and TAA 2 is CS1 (or vice versa). In some embodiments, TAA 1 is CLL1 and TAA 2 is CD38 (or vice versa). In some embodiments, TAA 1 is CLL1 and TAA 2 is CD133 (or vice versa). In some embodiments, TAA 1 is CLL1 and TAA 2 is FLT3 (or vice versa). In some embodiments, TAA 1 is CLL1 and TAA 2 is CD52 (or vice versa). In some embodiments, TAA 1 is CLL1 and TAA 2 is TNFRSF13C (or vice versa). In some embodiments, TAA 1 is CLL1 and TAA 2 is TNFRSF13B (or vice versa). In some embodiments, TAA 1 is CLL1 and TAA 2 is CXCR4 (or vice versa). In some embodiments, TAA 1 is CLL1 and TAA 2 is PD-L1 (or vice versa). In some embodiments, TAA 1 is CLL1 and TAA 2 is LY9 (or vice versa). In some embodiments, TAA 1 is CLL1 and TAA 2 is CD200 (or vice versa). In some embodiments, TAA 1 is CLL1 and TAA 2 is FCGR2B (or vice versa). In some embodiments, TAA 1 is CLL1 and TAA 2 is CD21 (or vice versa). In some embodiments, TAA 1 is CLL1 and TAA 2 is CD23 (or vice versa). In some embodiments, TAA 1 is CLL1 and TAA 2 is CD24 (or vice versa). In some embodiments, TAA 1 is CLL1 and TAA 2 is CD40L (or vice versa). In some embodiments, TAA 1 is CLL1 and TAA 2 is CD72 (or vice versa). In some embodiments, TAA 1 is CLL1 and TAA 2 is CD79a (or vice versa). In some embodiments, TAA 1 is CLL1 and TAA 2 is CD79b (or vice versa). In some embodiments, TAA 1 is CD138 and TAA 2 is CS1 (or vice versa). In some embodiments, TAA 1 is CD138 and TAA 2 is CD38 (or vice versa). In some embodiments, TAA 1 is CD138 and TAA 2 is CD133 (or vice versa). In some embodiments, TAA 1 is CD138 and TAA 2 is FLT3 (or vice versa). In some embodiments, TAA 1 is CD138 and TAA 2 is CD52 (or vice versa). In some embodiments, TAA 1 is CD138 and TAA 2 is TNFRSF13C (or vice versa). In some embodiments, TAA 1 is CD138 and TAA 2 is TNFRSF13B (or vice versa). In some embodiments, TAA 1 is CD138 and TAA 2 is CXCR4 (or vice versa). In some embodiments, TAA 1 is CD138 and TAA 2 is PD-L1 (or vice versa). In some embodiments, TAA 1 is CD138 and TAA 2 is LY9 (or vice versa). In some embodiments, TAA 1 is CD138 and TAA 2 is CD200 (or vice versa). In some embodiments, TAA 1 is CD138 and TAA 2 is FCGR2B (or vice versa). In some embodiments, TAA 1 is CD138 and TAA 2 is CD21 (or vice versa). In some embodiments, TAA 1 is CD138 and TAA 2 is CD23 (or vice versa). In some embodiments, TAA 1 is CD138 and TAA 2 is CD24 (or vice versa). In some embodiments, TAA 1 is CD138 and TAA 2 is CD40L (or vice versa). In some embodiments, TAA 1 is CD138 and TAA 2 is CD72 (or vice versa). In some embodiments, TAA 1 is CD138 and TAA 2 is CD79a (or vice versa). In some embodiments, TAA 1 is CD138 and TAA 2 is CD79b (or vice versa). In some embodiments, TAA 1 is CS1 and TAA 2 is CD38 (or vice versa). In some embodiments, TAA 1 is CS1 and TAA 2 is CD133 (or vice versa). In some embodiments, TAA 1 is CS1 and TAA 2 is FLT3 (or vice versa). In some embodiments, TAA 1 is CS1 and TAA 2 is CD52 (or vice versa). In some embodiments, TAA 1 is CS1 and TAA 2 is TNFRSF13C (or vice versa). In some embodiments, TAA 1 is CS1 and TAA 2 is TNFRSF13B (or vice versa). In some embodiments, TAA 1 is CS1 and TAA 2 is CXCR4 (or vice versa). In some embodiments, TAA 1 is CS1 and TAA 2 is PD-L1 (or vice versa). In some embodiments, TAA 1 is CS1 and TAA 2 is LY9 (or vice versa). In some embodiments, TAA 1 is CS1 and TAA 2 is CD200 (or vice versa). In some embodiments, TAA 1 is CS1 and TAA 2 is FCGR2B (or vice versa). In some embodiments, TAA 1 is CS1 and TAA 2 is CD21 (or vice versa). In some embodiments, TAA 1 is CS1 and TAA 2 is CD23 (or vice versa). In some embodiments, TAA 1 is CS1 and TAA 2 is CD24 (or vice versa). In some embodiments, TAA 1 is CS1 and TAA 2 is CD40L (or vice versa). In some embodiments, TAA 1 is CS1 and TAA 2 is CD72 (or vice versa). In some embodiments, TAA 1 is CS1 and TAA 2 is CD79a (or vice versa). In some embodiments, TAA 1 is CS1 and TAA 2 is CD79b (or vice versa). In some embodiments, TAA 1 is CD38 and TAA 2 is CD133 (or vice versa). In some embodiments, TAA 1 is CD38 and TAA 2 is FLT3 (or vice versa). In some embodiments, TAA 1 is CD38 and TAA 2 is CD52 (or vice versa). In some embodiments, TAA 1 is CD38 and TAA 2 is TNFRSF13C (or vice versa). In some embodiments, TAA 1 is CD38 and TAA 2 is TNFRSF13B (or vice versa). In some embodiments, TAA 1 is CD38 and TAA 2 is CXCR4 (or vice versa). In some embodiments, TAA 1 is CD38 and TAA 2 is PD-L1 (or vice versa). In some embodiments, TAA 1 is CD38 and TAA 2 is LY9 (or vice versa). In some embodiments, TAA 1 is CD38 and TAA 2 is CD200 (or vice versa). In some embodiments, TAA 1 is CD38 and TAA 2 is FCGR2B (or vice versa). In some embodiments, TAA 1 is CD38 and TAA 2 is CD21 (or vice versa). In some embodiments, TAA 1 is CD38 and TAA 2 is CD23 (or vice versa). In some embodiments, TAA 1 is CD38 and TAA 2 is CD24 (or vice versa). In some embodiments, TAA 1 is CD38 and TAA 2 is CD40L (or vice versa). In some embodiments, TAA 1 is CD38 and TAA 2 is CD72 (or vice versa). In some embodiments, TAA 1 is CD38 and TAA 2 is CD79a (or vice versa). In some embodiments, TAA 1 is CD38 and TAA 2 is CD79b (or vice versa). In some embodiments, TAA 1 is CD133 and TAA 2 is FLT3 (or vice versa). In some embodiments, TAA 1 is CD133 and TAA 2 is CD52 (or vice versa). In some embodiments, TAA 1 is CD133 and TAA 2 is TNFRSF13C (or vice versa). In some embodiments, TAA 1 is CD133 and TAA 2 is TNFRSF13B (or vice versa). In some embodiments, TAA 1 is CD133 and TAA 2 is CXCR4 (or vice versa). In some embodiments, TAA 1 is CD133 and TAA 2 is PD-L1 (or vice versa). In some embodiments, TAA 1 is CD133 and TAA 2 is LY9 (or vice versa). In some embodiments, TAA 1 is CD133 and TAA 2 is CD200 (or vice versa). In some embodiments, TAA 1 is CD133 and TAA 2 is FCGR2B (or vice versa). In some embodiments, TAA 1 is CD133 and TAA 2 is CD21 (or vice versa). In some embodiments, TAA 1 is CD133 and TAA 2 is CD23 (or vice versa). In some embodiments, TAA 1 is CD133 and TAA 2 is CD24 (or vice versa). In some embodiments, TAA 1 is CD133 and TAA 2 is CD40L (or vice versa). In some embodiments, TAA 1 is CD133 and TAA 2 is CD72 (or vice versa). In some embodiments, TAA 1 is CD133 and TAA 2 is CD79a (or vice versa). In some embodiments, TAA 1 is CD133 and TAA 2 is CD79b (or vice versa). In some embodiments, TAA 1 is FLT3 and TAA 2 is CD52 (or vice versa). In some embodiments, TAA 1 is FLT3 and TAA 2 is TNFRSF13C (or vice versa). In some embodiments, TAA 1 is FLT3 and TAA 2 is TNFRSF13B (or vice versa). In some embodiments, TAA 1 is FLT3 and TAA 2 is CXCR4 (or vice versa). In some embodiments, TAA 1 is FLT3 and TAA 2 is PD-L1 (or vice versa). In some embodiments, TAA 1 is FLT3 and TAA 2 is LY9 (or vice versa). In some embodiments, TAA 1 is FLT3 and TAA 2 is CD200 (or vice versa). In some embodiments, TAA 1 is FLT3 and TAA 2 is FCGR2B (or vice versa). In some embodiments, TAA 1 is FLT3 and TAA 2 is CD21 (or vice versa). In some embodiments, TAA 1 is FLT3 and TAA 2 is CD23 (or vice versa). In some embodiments, TAA 1 is FLT3 and TAA 2 is CD24 (or vice versa). In some embodiments, TAA 1 is FLT3 and TAA 2 is CD40L (or vice versa). In some embodiments, TAA 1 is FLT3 and TAA 2 is CD72 (or vice versa). In some embodiments, TAA 1 is FLT3 and TAA 2 is CD79a (or vice versa). In some embodiments, TAA 1 is FLT3 and TAA 2 is CD79b (or vice versa). In some embodiments, TAA 1 is CD52 and TAA 2 is TNFRSF13C (or vice versa). In some embodiments, TAA 1 is CD52 and TAA 2 is TNFRSF13B (or vice versa). In some embodiments, TAA 1 is CD52 and TAA 2 is CXCR4 (or vice versa). In some embodiments, TAA 1 is CD52 and TAA 2 is PD-L1 (or vice versa). In some embodiments, TAA 1 is CD52 and TAA 2 is LY9 (or vice versa). In some embodiments, TAA 1 is CD52 and TAA 2 is CD200 (or vice versa). In some embodiments, TAA 1 is CD52 and TAA 2 is FCGR2B (or vice versa). In some embodiments, TAA 1 is CD52 and TAA 2 is CD21 (or vice versa). In some embodiments, TAA 1 is CD52 and TAA 2 is CD23 (or vice versa). In some embodiments, TAA 1 is CD52 and TAA 2 is CD24 (or vice versa). In some embodiments, TAA 1 is CD52 and TAA 2 is CD40L (or vice versa). In some embodiments, TAA 1 is CD52 and TAA 2 is CD72 (or vice versa). In some embodiments, TAA 1 is CD52 and TAA 2 is CD79a (or vice versa). In some embodiments, TAA 1 is CD52 and TAA 2 is CD79b (or vice versa). In some embodiments, TAA 1 is TNFRSF13C and TAA 2 is TNFRSF13B (or vice versa). In some embodiments, TAA 1 is TNFRSF13C and TAA 2 is CXCR4 (or vice versa). In some embodiments, TAA 1 is TNFRSF13C and TAA 2 is PD-L1 (or vice versa). In some embodiments, TAA 1 is TNFRSF13C and TAA 2 is LY9 (or vice versa). In some embodiments, TAA 1 is TNFRSF13C and TAA 2 is CD200 (or vice versa). In some embodiments, TAA 1 is TNFRSF13C and TAA 2 is FCGR2B (or vice versa). In some embodiments, TAA 1 is TNFRSF13C and TAA 2 is CD21 (or vice versa). In some embodiments, TAA 1 is TNFRSF13C and TAA 2 is CD23 (or vice versa). In some embodiments, TAA 1 is TNFRSF13C and TAA 2 is CD24 (or vice versa). In some embodiments, TAA 1 is TNFRSF13C and TAA 2 is CD40L (or vice versa). In some embodiments, TAA 1 is TNFRSF13C and TAA 2 is CD72 (or vice versa). In some embodiments, TAA 1 is TNFRSF13C and TAA 2 is CD79a (or vice versa). In some embodiments, TAA 1 is TNFRSF13C and TAA 2 is CD79b (or vice versa). In some embodiments, TAA 1 is TNFRSF13B and TAA 2 is CXCR4 (or vice versa). In some embodiments, TAA 1 is TNFRSF13B and TAA 2 is PD-L1 (or vice versa). In some embodiments, TAA 1 is TNFRSF13B and TAA 2 is LY9 (or vice versa). In some embodiments, TAA 1 is TNFRSF13B and TAA 2 is CD200 (or vice versa). In some embodiments, TAA 1 is TNFRSF13B and TAA 2 is FCGR2B (or vice versa). In some embodiments, TAA 1 is TNFRSF13B and TAA 2 is CD21 (or vice versa). In some embodiments, TAA 1 is TNFRSF13B and TAA 2 is CD23 (or vice versa). In some embodiments, TAA 1 is TNFRSF13B and TAA 2 is CD24 (or vice versa). In some embodiments, TAA 1 is TNFRSF13B and TAA 2 is CD40L (or vice versa). In some embodiments, TAA 1 is TNFRSF13B and TAA 2 is CD72 (or vice versa). In some embodiments, TAA 1 is TNFRSF13B and TAA 2 is CD79a (or vice versa). In some embodiments, TAA 1 is TNFRSF13B and TAA 2 is CD79b (or vice versa). In some embodiments, TAA 1 is CXCR4 and TAA 2 is PD-L1 (or vice versa). In some embodiments, TAA 1 is CXCR4 and TAA 2 is LY9 (or vice versa). In some embodiments, TAA 1 is CXCR4 and TAA 2 is CD200 (or vice versa). In some embodiments, TAA 1 is CXCR4 and TAA 2 is FCGR2B (or vice versa). In some embodiments, TAA 1 is CXCR4 and TAA 2 is CD21 (or vice versa). In some embodiments, TAA 1 is CXCR4 and TAA 2 is CD23 (or vice versa). In some embodiments, TAA 1 is CXCR4 and TAA 2 is CD24 (or vice versa). In some embodiments, TAA 1 is CXCR4 and TAA 2 is CD40L (or vice versa). In some embodiments, TAA 1 is CXCR4 and TAA 2 is CD72 (or vice versa). In some embodiments, TAA 1 is CXCR4 and TAA 2 is CD79a (or vice versa). In some embodiments, TAA 1 is CXCR4 and TAA 2 is CD79b (or vice versa). In some embodiments, TAA 1 is PD-L1 and TAA 2 is LY9 (or vice versa). In some embodiments, TAA 1 is PD-L1 and TAA 2 is CD200 (or vice versa). In some embodiments, TAA 1 is PD-L1 and TAA 2 is FCGR2B (or vice versa). In some embodiments, TAA 1 is PD-L1 and TAA 2 is CD21 (or vice versa). In some embodiments, TAA 1 is PD-L1 and TAA 2 is CD23 (or vice versa). In some embodiments, TAA 1 is PD-L1 and TAA 2 is CD24 (or vice versa). In some embodiments, TAA 1 is PD-L1 and TAA 2 is CD40L (or vice versa). In some embodiments, TAA 1 is PD-L1 and TAA 2 is CD72 (or vice versa). In some embodiments, TAA 1 is PD-L1 and TAA 2 is CD79a (or vice versa). In some embodiments, TAA 1 is PD-L1 and TAA 2 is CD79b (or vice versa). In some embodiments, TAA 1 is LY9 and TAA 2 is CD200 (or vice versa). In some embodiments, TAA 1 is LY9 and TAA 2 is FCGR2B (or vice versa). In some embodiments, TAA 1 is LY9 and TAA 2 is CD21 (or vice versa). In some embodiments, TAA 1 is LY9 and TAA 2 is CD23 (or vice versa). In some embodiments, TAA 1 is LY9 and TAA 2 is CD24 (or vice versa). In some embodiments, TAA 1 is LY9 and TAA 2 is CD40L (or vice versa). In some embodiments, TAA 1 is LY9 and TAA 2 is CD72 (or vice versa). In some embodiments, TAA 1 is LY9 and TAA 2 is CD79a (or vice versa). In some embodiments, TAA 1 is LY9 and TAA 2 is CD79b (or vice versa). In some embodiments, TAA 1 is CD200 and TAA 2 is FCGR2B (or vice versa). In some embodiments, TAA 1 is CD200 and TAA 2 is CD21 (or vice versa). In some embodiments, TAA 1 is CD200 and TAA 2 is CD23 (or vice versa). In some embodiments, TAA 1 is CD200 and TAA 2 is CD24 (or vice versa). In some embodiments, TAA 1 is CD200 and TAA 2 is CD40L (or vice versa). In some embodiments, TAA 1 is CD200 and TAA 2 is CD72 (or vice versa). In some embodiments, TAA 1 is CD200 and TAA 2 is CD79a (or vice versa). In some embodiments, TAA 1 is CD200 and TAA 2 is CD79b (or vice versa). In some embodiments, TAA 1 is CD21 and TAA 2 is CD23 (or vice versa). In some embodiments, TAA 1 is CD21 and TAA 2 is CD24 (or vice versa). In some embodiments, TAA 1 is CD21 and TAA 2 is CD40L (or vice versa). In some embodiments, TAA 1 is CD21 and TAA 2 is CD72 (or vice versa). In some embodiments, TAA 1 is CD21 and TAA 2 is CD79a (or vice versa). In some embodiments, TAA 1 is CD21 and TAA 2 is CD79b (or vice versa). In some embodiments, TAA 1 is CD23 and TAA 2 is CD24 (or vice versa). In some embodiments, TAA 1 is CD23 and TAA 2 is CD40L (or vice versa). In some embodiments, TAA 1 is CD23 and TAA 2 is CD72 (or vice versa). In some embodiments, TAA 1 is CD23 and TAA 2 is CD79a (or vice versa). In some embodiments, TAA 1 is CD23 and TAA 2 is CD79b (or vice versa). In some embodiments, TAA 1 is CD24 and TAA 2 is CD40L (or vice versa). In some embodiments, TAA 1 is CD24 and TAA 2 is CD72 (or vice versa). In some embodiments, TAA 1 is CD24 and TAA 2 is CD79a (or vice versa). In some embodiments, TAA 1 is CD24 and TAA 2 is CD79b (or vice versa). In some embodiments, TAA 1 is CD40L and TAA 2 is CD72 (or vice versa). In some embodiments, TAA 1 is CD40L and TAA 2 is CD79a (or vice versa). In some embodiments, TAA 1 is CD40L and TAA 2 is CD79b (or vice versa). In some embodiments, TAA 1 is CD72 and TAA 2 is CD79a (or vice versa). In some embodiments, TAA 1 is CD72 and TAA 2 is CD79b (or vice versa). In some embodiments, TAA 1 is CD79a and TAA 2 is CD79b (or vice versa).

[0555] A TAA-binding ABM can comprise, for example, an anti-TAA antibody or an antigen-binding fragment thereof. The anti-TAA antibody or antigen-binding fragment can comprise, for example, the CDR sequences of an antibody set forth in Table 15A or Table 15B. In some embodiments, the anti-TAA antibody or antigen-binding domain thereof has the heavy and light chain variable region sequences of an antibody set forth in Table 15A. In some embodiments, the anti-TAA antibody or antigen-binding domain thereof has the heavy and light chain variable region sequences of an antibody set forth in Table 15B.

TABLE 15A
Exemplary Anti-Tumor-Associated Antigen Antibodies

| Target | Examples of Antibody Name and/or Reference(s) and/or Source |
|---|---|
| ALK | antibodies described in e.g., Mino-Kenudson et al., 2010, Clin Cancer Res |
| | 16(5): 1561-1571 |
| B7H3 | MGA271 (Macrogenics) |
| BCMA | Any BCMA antibody described in WO2012163805, WO200112812, or |
| | WO2003062401. |
| CAIX | Antibody clone 303123 (R&D Systems) |
| CD123 | U.S. Pat. No. 8,852,551; EP2426148; WO2014138819; WO2016028896; WO2014130635 |
| CD171 | Hong et al., 2014, J Immunother 37(2): 93-104. |
| CD19 | WO2014031687; WO2012079000; WO2014153270; U.S. Pat. No. 7,741,465; the |
| | CD19 binder of Yescarta or Blinatumomab |
| CD20 | Rituximab, Ofatumumab, Ocrelizumab, Veltuzumab, or GA101 |
| CD22 | Haso et al., 2013, Blood, 121(7): 1165-1174; Wayne et al., 2010, Clin Cancer Res |
| | 16(6): 1894-1903; Kato et al., 2013, Leuk Res 37(1): 83-88; Creative BioMart |
| | (creativebiomart.net): MOM-18047-S(P). |
| CD24 | Maliar et al., Gastroenterology 143(5): 1375-1384 (2012) |
| CD30 | Any CD30 antibody described in U.S. Pat. No. 7,090,843 B1, or EP0805871 |
| CD33 | Bross et al., 2001, Clin Cancer Res 7(6): 1490-1496 (Gemtuzumab Ozogamicin, |
| | hP67.6), Caron et al., 1992, Cancer Res 52(24): 6761-6767 (Lintuzumab, HuM195), |
| | Lapusan et al., 2012, Invest New Drugs 30(3): 1121-1131 (AVE9633), Aigner et al., |
| | 2013, Leukemia 27(5): 1107-1115 (AMG330, CD33 BiTE), Dutour et al., 2012, Adv |
| | Hematol 2012: 683065, or Pizzitola et al., 2014, Leukemia |
| | doi: 10.1038/Lue.2014.62. |
| CD38 | Daratumumab (see, e.g., Groen et al., 2010, Blood 116(21): 1261-1262; MOR202 |
| | (see, e.g., U.S. Pat. No. 8,263,746); or any CD38 antibody described in U.S. Pat. No. |
| | 8,362,211. |
| CD44v6 | Casucci et al., 2013, Blood 122(20): 3461-3472. |
| CD97 | antibodies described in, e.g., U.S. Pat. No. 6,846,911; de Groot et al., 2009, J |
| | Immunol 183(6): 4127-4134; antibody from R&D: MAB373 |
| CEA | Chmielewski et al., 2012, Gastoenterology 143(4): 1095-1107. |
| CLDN6 | WO2015069794; IMAB027, mAb, Ganymed Pharmaceuticals |
| CLL-1 | PE-CLL1-hu Cat# 353604 (BioLegend); and PE-CLL1 (CLEC12A) Cat# 562566 |
| | (BD); WO 2014/051433 A1; US 2016/0368994 A1; US 2013/0295118 A1; U.S. Pat. |
| | No. 8,536,310 B2; Lu et al., 2014, Angewandte Chemie International Edition |
| | 53(37): 9841-9845; Leong et al., 2017, Blood 129(5): 609-618 |
| CS1 | Elotuzumab (BMS), see e.g., Tai et al., 2008, Blood 112(4): 1329-37; Tai et al., |
| | 2007, Blood. 110(5): 1656-63. |
| EGFR | Cetuximab, panitumumab, zalutumumab, nimotuzumab, or matuzumab |
| EGFRvIII | WO2012138475; WO2014130657 |
| EPCAM | MT110, EpCAM-CD3 bispecific Ab (see, e.g., |
| | clinicaltrials.gov/ct2/show/NCT00635596); Edrecolomab; 3622W94; ING-1; or |
| | adecatumumab (MT201). |
| EphA2 | Yu et al., 2014, Mol Ther 22(1): 102-111. |
| Ephrin B2 | Abengozar et al., 2012, Blood 119(19): 4565-4576. |
| ERBB2 | Trastuzumab or pertuzumab. |
| (Her2/neu) | |
| FAP | Ostermann et al., 2008, Clinical Cancer Research 14: 4584-4592 (FAP5), US Pat. |
| | Publication No. 2009/0304718; sibrotuzumab (see e.g., Hofheinz et al., 2003, |
| | Oncology Research and Treatment 26(1): 44-48); and Tran et al., 2013, J Exp Med |
| | 210(6): 1125-1135. |
| FLT3 | Any FLT3 antibody described in WO2011076922, U.S. Pat. No. 5,777,084, |
| | EP0754230, or US20090297529. |
| Folate | IMGN853, or any folate receptor alpha antibody described in US20120009181; U.S. |
| receptor | Pat. No. 4,851,332, LK26: U.S. Pat. No. 5,952,484. |
| alpha | |
| Folate | antibodies described in, e.g., US20100297138; WO2007/067992 |
| receptor | |
| beta | |
| GD2 | Mujoo et al., Cancer Res. 47(4): 1098-1104 (1987); Cheung et al., Cancer Res |
| | 45(6): 2642-2649 (1985), Cheung et al., J Clin Oncol 5(9): 1430-1440 (1987), |
| | Cheung et al., J Clin Oncol 16(9): 3053-3060 (1998), Handgretinger et al., Cancer |
| | Immunol Immunother 35(3): 199-204 (1992); |
| | mAb 14.18, 14G2a, ch14.18, hu14.18, 3F8, hu3F8, 3G6, 8B6, 60C3, 10B8, |
| | ME36.1, or 8H9 (see e.g., WO2012033885, WO2013040371, WO2013192294, |
| | WO2013061273, WO2013123061, WO2013074916, and WO201385552). |
| | Any GD2 antibody described in US Publication No.: 20100150910 or PCT |
| | Publication No.: WO 2011160119. |
| GD3 | Any GD3 antibody described in U.S. Pat. No. 7,253,263; U.S. Pat. No. 8,207,308; US |
| | 20120276046; EP1013761; W02005035577; or U.S. Pat. No. 6,437,098. |
| GloboH | VK9; Kudryashov et al., 1998, Glycoconj J. 15(3): 243-9; Lou et al., 2014, Proc Natl |
| | Acad Sci USA 111(7): 2482-2487; MBr1: Bremer et al., 1984, J Biol Chem |
| | 259: 14773-14777. |
| gp100 | HMB45, NKIbetaB, or any anti-gp100 antibody described in WO2013165940, or |
| | US20130295007 |
| GPRC5D | R&Dsystems: FAB6300A; Lifespan Biosciences: LS-A4180 |
| HMWMAA | antibodies described in, e.g., Kmiecik et al., 2014, Oncoimmunology 3(1): e27185 |
| | (PMID: 24575382) (mAb9.2.27); U.S. Pat. No. 6,528,481; WO2010033866; US |
| | 20140004124 |
| IGF-I | Any IGF-I receptor antibody described in U.S. Pat. No. 8,344,112 B2; EP2322550 A1; WO |
| receptor | 2006/138315, or PCT/US2006/022995. |
| IL-11Ra | Abcam (cat# ab55262) or Novus Biologicals (cat# EPR5446) |
| IL-13Ra2 | Any IL-13Ra2 antibody described in WO2008/146911, WO2004087758, or |
| | WO2004087758 |
| KIT | Any KIT antibody described in U.S. Pat. No. 7,915,391, US20120288506 |
| KLRG2 | ab121563 (Abcam); B-12 or sc-514346 (Santa Cruz); HPA018199 (Sigma Aldrich) |
| LewisY | Kelly et al., Cancer Biother Radiopharm 23(4): 411-423 (2008) (hu3S193 Ab |
| | (scFvs)); Dolezal et al., Protein Engineering 16(1): 47-56 (2003) (NC10 scFv) |
| LMP2 | Any LMP2 antibody described in U.S. Pat. No. 7,410,640 or US 2005/0129701 |
| LRP6 | WO2009064944, WO2009056634, WO2011119661, WO2011138392, |
| | WO2011138391, WO2013067355, WO2014029752, WO2017093478 |
| Mesothelin | Any mesothelin antibody described in US 20110262448, US 2012/0107933 or |
| | U.S. Pat. No. 9,719,996 |
| MUC1 | SAR566658 |
| NCAM | 2-2B: MAB5324 (EMD Millipore) |
| NY-BR-1 | antibodies described in, e.g., Jager et al., 2007, Appl Immunohitochem Mol |
| | Morphol 15(1): 77-83 |
| o-acetyl- | 8B6 |
| GD2 | |
| PDGFR- | Abcam ab32570 |
| beta | |
| PLAC1 | antibodies described in, e.g., Ghods et al., 2013, Biotechnol Appl Biochem |
| | doi: 10.1002/bab.1177 |
| Polysialic | antibodies described in e.g., Nagae et al., 2013, J Biol Chem 288(47): 33784- |
| acid | 33796 |
| PRSS21 | Any PRSS21 antibody described in U.S. Pat. No. 8,080,650. |
| PSCA | Morgenroth et al., Prostate 67(10): 1121-1131 (2007) (scFv 7F5); Nejatollahi et al., |
| | J of Oncology 2013(2013), article ID 839831 (scFv C5-II); or any PSCA antibody |
| | described in US Pat Publication No. 20090311181. |
| PSMA | Parker et al., Protein Expr Purif 89(2): 136-145 (2013), US 20110268656 (J591 |
| | ScFv); Frigerio et al, European J Cancer 49(9): 2223-2232 (2013) (scFvD2B); WO |
| | 2006125481 (mAbs 3/A12, 3/E7 and 3/F11) or single chain antibody fragments |
| | (scFv A5 and D7). |
| ROR1 | Hudecek et al., Clin Cancer Res 19(12): 3153-3164 (2013); or any ROR1 antibody |
| | described in WO 2011159847 or US20130101607. |
| SSEA-4 | MC813 (Cell Signaling) |
| TAG72 | Hornbach et al., Gastroenterology 113(4): 1163-1170 (1997) or Abcam ab691. |
| TEM1/ | antibodies described in, e.g., Marty et al., 2006, Cancer Lett 235(2): 298-308; Zhao |
| CD248 | et al., 2011, J Immunol Methods 363(2): 221-232 |
| Tn | Brooks et al., PNAS 107(22): 10056-10061 (2010); Stone et al., Oncolmmunology |
| | 1(6): 863-873(2012); any Tn antibody described in U.S. Pat. No. 8,440,798 |
| TSHR | antibodies described in, e.g., Marty et al., 2006, Cancer Lett 235(2): 298-308; Zhao |
| | et al., 2011, J Immunol Methods 363(2): 221-232 |
| Tyrosinase | Any tyrosinase antibody described in U.S. Pat. No. 5,843,674 or US19950504048. |
| VEGFR2 | Chinnasamy et al., J Clin Invest 120(11): 3953-3968 (2010). |

TABLE 15B
Exemplary Anti-Tumor-Associated Antigen Antibodies

| Target | Examples of Antibody Name and/or Reference(s) and/or Source |
|---|---|
| CD123 | Any CD123 antibody described in U.S. Pat. No. 8,852,551, EP2426148, WO |
| | 2014/138819, WO 2016/028896, or WO 2014/130635 |
| BCMA | Any BCMA antibody described in WO2012163805, WO200112812, or |
| | WO2003062401. |
| CD19 | Any CD19 antibody described in WO 2014/031687, WO 2012/079000, WO |
| | 2014/153270, or U.S. Pat. No. 7,741,465; the CD19 binder of Yescarta or |
| | Blinatumomab |
| CD20 | Rituximab, Ofatumumab, Ocrelizumab, Veltuzumab, or GA101 |
| CD22 | Any CD22 antibody described in Haso et al., 2013, Blood, 121(7): 1165-1174, |
| | Wayne et al., 2010, Clin Cancer Res 16(6): 1894-1903, Kato et al., 2013, Leuk |
| | Res 37(1): 83-88, or Creative BioMart (creativebiomart.net): MOM-18047-S(P). |
| CD33 | Any CD33 antibody described in Bross et al., 2001, Clin Cancer Res 7(6): 1490- |
| | 1496 (Gemtuzumab Ozogamicin, hP67.6),Caron et al., 1992, Cancer Res |
| | 52(24): 6761-6767 (Lintuzumab, HuM195), Lapusan et al., 2012, Invest New |
| | Drugs 30(3): 1121-1131 (AVE9633), Aigner et al., 2013, Leukemia 27(5): 1107- |
| | 1115 (AMG330, CD33 BiTE), Dutour et al., 2012, Adv Hematol 2012: 683065, or |
| | Pizzitola et al., 2014, Leukemia doi: 10.1038/Lue.2014.62. |
| CD38 | Daratumumab (see, e.g., Groen et al., 2010, Blood 116(21): 1261-1262; MOR202 |
| | (see, e.g., U.S. Pat. No. 8,263,746); or any CD38 antibody described in U.S. Pat. |
| | No. 8,362,211. |
| CLL-1 | PE-CLL1-hu Cat# 353604 (BioLegend); PE-CLL1 (CLEC12A) Cat# 562566 (BD); |
| | Any CLL-1 antibody described in WO 2014/051433 A1, US 2016/0368994 A1, |
| | US 2013/0295118 A1, U.S. Pat. No. 8,536,310 B2, Lu et al., 2014, Angewandte |
| | Chemie International Edition 53(37): 9841-9845, or Leong et al., 2017, Blood |
| | 129(5): 609-618 |
| CS1 | Elotuzumab (BMS), see e.g., Tai et al., 2008, Blood 112(4): 1329-37; Tai et al., |
| | 2007, Blood. 110(5): 1656-63. |
| FLT3 | Any FLT3 antibody described in WO 2011/076922, U.S. Pat. No. 5,777,084, |
| | EP0754230, or US 2009/0297529. |
| CD133 | Any CD133 antibody described in U.S. Pat. No. 9,624,303, WO 2016/154623, or |
| | WO 2011/089211; 5E3 (ThermoFisher); MAB11331 (R&D Systems); MAB4310 |
| | (Millipore Sigma) |
| CD138 | Any CD138 antibody described in WO/2009/080829, WO/2017/014679, or U.S. |
| | Pat. No. 9,289,509; nBT062 (Biotest AG); MI15, B-A38, SP152, DL-101 |
| | (ThermoFisher) |
| CD52 | alemtuzumab (Genzyme); ANT1034 (see, Holgate et al., 2015, PLOS ONE 10(9): |
| | e0138123; any CD52 antibody described in WO/2010/132659; any CD52 |
| | antibody described in U.S. Pat. No. 9,708,407; any CD52 antibody described in |
| | WO/2010/132659 |
| TNFRSF13C | Any TNFRSF13C antibody described in WO 2010/007082, U.S. Pat. No. |
| | 9,382,326 |
| TNFRSF13B | Any TNFRSF13B antibody described in WO 2004/011611; LS-C89973 (Lifespan |
| | Biosciences, Inc.) M02952-1 (Boster Biological Technology); MAB1041, |
| | MAB1741, and MAB174 (R&D Systems) |
| CXCR4 | Any CXCR4 antibody described in U.S. Pat. Nos. 7,138,496, 8,329,178, |
| | 8,450,464, 9,249,223, or 9,260,527 |
| PD-L1 | Any PD-L1 antibody described in US 2015/0203580, US 2017/0058033, US |
| | 2017/0204184, U.S. Pat. No. 8,741,295, U.S. Pat. No. 9,789,183, or U.S. Pat. No. |
| | 9,637,546 |
| LY9 | HLy9.25 (e.g., Lifespan Biosciences, Inc. cat. no. LS-C112605); MAB1898 (R&D |
| | Systems) |
| CD200 | Any CD200 antibody described in U.S. Pat. No. 7,887,798; ab23552 (Abcam); |
| | Ox104 (ThermoFisher) |
| FCGR2B | Any FCGR2B antibody described in U.S. Pat. No. 8,802,089 or WO 2017/103895; |
| | ab45143 (Abcam); AT130-2 (ThermoFisher); 2E10 (Millipore Sigma) |
| CD21 | ab75985 (Abcam); ab9492 (Abcam); 2G9 (ThermoFisher); HB5 (ThermoFisher); |
| | MAB4909 (R&D Systems) |
| CD23 | Any CD23 antibody described in U.S. Pat. No. 7,008,623 or U.S. Pat. No. |
| | 6,011,138; lumiliximab (Biogen); ab16702 (Abcam); SP23 (ThermoFisher) |
| CD24 | Any CD24 antibody described in U.S. Pat. No. 8,614,301; SN3 (ThermoFisher); |
| | SN3b (ThermoFisher); 2Q1282 (Santa Cruz Biotechnology); 3H1143 (Santa Cruz |
| | Biotechnology); ALB9 (Santa Cruz Biotechnology); MAB5248 (R&D Systems) |
| CD40L | Any CD40L antibody described in U.S. Pat. No. 9,228,018 or US 2003/0099642; |
| | 24-31 (Biolegend); ab52750 (Abcam); ab47204 (Abcam); CDP7657 (UCB |
| | Pharma); 5c8 (Biogen) |
| CD72 | 3F3 (Biolegend); Bu40 (ThermoFisher); H-7 (Santa Cruz Biotechnology); H-96 |
| | (Santa Cruz Biotechnology); G-5 (Santa Cruz Biotechnology); ab92509 (Abcam) |
| CD79a | ab62650 (Abcam); ab79414 (Abcam); MAB69201 (R&D Systems); HM57 (Bio- |
| | Rad) |
| CD79b | Any CD79b antibody described in WO 2014/011521; ab130422 (Abcam); |
| | ab134147 (Abcam); polatuzumab (Genentech) |

[0556] In certain embodiments, TAA 1 and TAA 2 are selected from CD19, CD20 and BCMA. In other embodiments, TAA 1 and TAA 2 are selected from BCMA and CD19. Exemplary BCMA and CD19 binding sequences are set forth in Sections 7.10.1 and 7.10.2, infra.

[0557] 7.10.1. BCMA

[0558] In certain aspects, the present disclosure provides a MBM in which ABM2 or ABM3 is BCMA (such ABMs can be referred to as “BCMA ABMs” for convenience). BCMA is a tumor necrosis family receptor (TNFR) member expressed on cells of the B-cell lineage. BCMA expression is the highest on terminally differentiated B cells that assume the long lived plasma cell fate, including plasma cells, plasmablasts and a subpopulation of activated B cells and memory B cells. BCMA is involved in mediating the survival of plasma cells for maintaining long-term humoral immunity. The expression of BCMA has been recently linked to a number of cancers, autoimmune disorders, and infectious diseases. Cancers with increased expression of BCMA include some hematological cancers, such as multiple myeloma, Hodgkin's and non-Hodgkin's lymphoma, various leukemias, and glioblastoma.

[0559] MBMs comprising an ABM that binds to BCMA can comprise, for example, an anti-BCMA antibody or an antigen-binding domain thereof. The anti-BCMA antibody or antigen-binding domain thereof can comprise, for example, CDR, VH, VL, or scFV sequences set forth in Tables 16A-16G.

TABLE 16A
BCMA Binders - Variable domain and scFv sequences

| | | | SEQ |
|---|---|---|---|
| | | | ID |
| Antibody | Domain | Sequence | NO. |
| BCMA-1 | VH | EVQLVESGGGLVQPGGSLRLSCAVSGFALSNHGMSVVVRRAPGK | 687 |
| | | GLEVVVSGIVYSGSTYYAASVKGRFTISRDNSRNTLYLQMNSLRPE | |
| | | DTAIYYCSAHGGESDVWGQGTTVTVSS | |
| | VL | DIQLTQSPSSLSASVGDRVTITCRASQSISSYLNVVYQQKPGKAPKL | 688 |
| | | LIYAASSLQSGVPSRFSGSGSGTDFTLTISSLQPEDFATYYCQQSY | |
| | | STPYTFGQGTKVEIK | |
| | scFv | EVQLVESGGGLVQPGGSLRLSCAVSGFALSNHGMSVVVRRAPGK | 689 |
| | | GLEVVVSGIVYSGSTYYAASVKGRFTISRDNSRNTLYLQMNSLRPE | |
| | | DTAIYYCSAHGGESDVWGQGTTVTVSSASGGGGSGGRASGGGG | |
| | | SDIQLTQSPSSLSASVGDRVTITCRASQSISSYLNVVYQQKPGKAPK | |
| | | LLIYAASSLQSGVPSRFSGSGSGTDFTLTISSLQPEDFATYYCQQS | |
| | | YSTPYTFGQGTKVEIK | |
| BCMA-2 | VH | QVQLVESGGGLVQPGRSLRLSCAASGFTFSNYAMSVVVRQAPGK | 690 |
| | | GLGVVVSGISRSGENTYYADSVKGRFTISRDNSKNTLYLQMNSLRD | |
| | | EDTAVYYCARSPAHYYGGMDVWGQGTTVTVSS | |
| | VL | DIVLTQSPGTLSLSPGERATLSCRASQSISSSFLAVVYQQKPGQAP | 691 |
| | | RLLIYGASRRATGIPDRFSGSGSGTDFTLTISRLEPEDSAVYYCQQ | |
| | | YHSSPSVVTFGQGTKLEIK | |
| | scFv | QVQLVESGGGLVQPGRSLRLSCAASGFTFSNYAMSVVVRQAPGK | 692 |
| | | GLGVVVSGISRSGENTYYADSVKGRFTISRDNSKNTLYLQMNSLRD | |
| | | EDTAVYYCARSPAHYYGGMDVWGQGTTVTVSSASGGGGSGGRA | |
| | | SGGGGSDIVLTQSPGTLSLSPGERATLSCRASQSISSSFLAVVYQQ | |
| | | KPGQAPRLLIYGASRRATGIPDRFSGSGSGTDFTLTISRLEPEDSA | |
| | | VYYCQQYHSSPSVVTFGQGTKLEIK | |
| BCMA-3 | VH | QVQLVESGGGLVQPGRSLRLSCAASGFTFDDYAMHVVVRQAPGK | 693 |
| | | GLEVVVSGISWNSGSIGYADSVKGRFTISRDNAKNSLYLQMNSLRA | |
| | | EDTALYYCSVHSFLAYWGQGTLVTVSS | |
| | VL | DIVMTQTPLSLPVTPGEPASISCRSSQSLLHSNGYNYLDVVYLQKP | 694 |
| | | GQSPQLLIYLGSNRASGVPDRFSGSGSGTDFTLKISRVEAEDVGV | |
| | | YYCMQALQTPYTFGQGTKVEIK | |
| | scFv | QVQLVESGGGLVQPGRSLRLSCAASGFTFDDYAMHVVVRQAPGK | 695 |
| | | GLEVVVSGISWNSGSIGYADSVKGRFTISRDNAKNSLYLQMNSLRA | |
| | | EDTALYYCSVHSFLAYWGQGTLVTVSSASGGGGSGGRASGGGG | |
| | | SDIVMTQTPLSLPVTPGEPASISCRSSQSLLHSNGYNYLDVVYLQKP | |
| | | GQSPQLLIYLGSNRASGVPDRFSGSGSGTDFTLKISRVEAEDVGV | |
| | | YYCMQALQTPYTFGQGTKVEIK | |
| BCMA-4 | VH | EVQLLESGGGLVQPGGSLRLSCAVSGFALSNHGMSVVVRRAPGK | 696 |
| | | GLEVVVSGIVYSGSTYYAASVKGRFTISRDNSRNTLYLQMNSLRPE | |
| | | DTAIYYCSAHGGESDVWGQGTTVTVSS | |
| | VL | DIVMTQTPLSLSVTPGQPASISCKSSQSLLRNDGKTPLYVVYLQKA | 697 |
| | | GQPPQLLIYEVSNRFSGVPDRFSGSGSGTDFTLKISRVEAEDVGA | |
| | | YYCMQNIQFPSFGGGTKLEIK | |
| | scFv | EVQLLESGGGLVQPGGSLRLSCAVSGFALSNHGMSVVVRRAPGK | 698 |
| | | GLEVVVSGIVYSGSTYYAASVKGRFTISRDNSRNTLYLQMNSLRPE | |
| | | DTAIYYCSAHGGESDVWGQGTTVTVSSASGGGGSGGRASGGGG | |
| | | SDIVMTQTPLSLSVTPGQPASISCKSSQSLLRNDGKTPLYVVYLQKA | |
| | | GQPPQLLIYEVSNRFSGVPDRFSGSGSGTDFTLKISRVEAEDVGA | |
| | | YYCMQNIQFPSFGGGTKLEIK | |
| BCMA-5 | VH | QVQLVQSGAEVRKTGASVKVSCKASGYIFDNFGINVVVRQAPGQG | 699 |
| | | LEWMGWINPKNNNTNYAQKFQGRVTITADESTNTAYMEVSSLRS | |
| | | EDTAVYYCARGPYYYQSYMDVWGQGTMVTVSS | |
| | VL | DIVMTQTPLSLPVTPGEPASISCRSSQSLLHSNGYNYLNVVYLQKP | 700 |
| | | GQSPQLLIYLGSKRASGVPDRFSGSGSGTDFTLHITRVGAEDVGV | |
| | | YYCMQALQTPYTFGQGTKLEIK | |
| | scFv | QVQLVQSGAEVRKTGASVKVSCKASGYIFDNFGINVVVRQAPGQG | 701 |
| | | LEWMGWINPKNNNTNYAQKFQGRVTITADESTNTAYMEVSSLRS | |
| | | EDTAVYYCARGPYYYQSYMDVWGQGTMVTVSSASGGGGSGGR | |
| | | ASGGGGSDIVMTQTPLSLPVTPGEPASISCRSSQSLLHSNGYNYL | |
| | | NVVYLQKPGQSPQLLIYLGSKRASGVPDRFSGSGSGTDFTLHITRV | |
| | | GAEDVGVYYCMQALQTPYTFGQGTKLEIK | |
| BCMA-6 | VH | QVQLQESGGGLVQPGGSLRLSCAASGFTFSSDAMTVVVRQAPGK | 702 |
| | | GLEVVVSVISGSGGTTYYADSVKGRFTISRDNSKNTLYLQMNSLRA | |
| | | EDTAVYYCAKLDSSGYYYARGPRYWGQGTLVTVSS | |
| | VL | DIQLTQSPSSLSASVGDRVTITCRASQSISSYLNVVYQQKPGKAPKL | 703 |
| | | LIYGASTLASGVPARFSGSGSGTHFTLTINSLQSEDSATYYCQQSY | |
| | | KRASFGQGTKVEIK | |
| | scFv | QVQLQESGGGLVQPGGSLRLSCAASGFTFSSDAMTVVVRQAPGK | 704 |
| | | GLEVVVSVISGSGGTTYYADSVKGRFTISRDNSKNTLYLQMNSLRA | |
| | | EDTAVYYCAKLDSSGYYYARGPRYWGQGTLVTVSSASGGGGSG | |
| | | GRASGGGGSDIQLTQSPSSLSASVGDRVTITCRASQSISSYLNVVY | |
| | | QQKPGKAPKLLIYGASTLASGVPARFSGSGSGTHFTLTINSLQSED | |
| | | SATYYCQQSYKRASFGQGTKVEIK | |
| BCMA-7 | VH | QVQLVQSGAEVKKPGASVKVSCKASGYTFSNYGITVVVRQAPGQG | 705 |
| | | LEWMGWISAYNGNTNYAQKFQGRVTMTRNTSISTAYMELSSLRS | |
| | | EDTAVYYCARGPYYYYMDVWGKGTMVTVSS | |
| | VL | EIVMTQSPLSLPVTPGEPASISCRSSQSLLYSNGYNYVDVVYLQKP | 706 |
| | | GQSPQLLIYLGSNRASGVPDRFSGSGSGTDFKLQISRVEAEDVGIY | |
| | | YCMQGRQFPYSFGQGTKVEIK | |
| | scFv | QVQLVQSGAEVKKPGASVKVSCKASGYTFSNYGITVVVRQAPGQG | 707 |
| | | LEWMGWISAYNGNTNYAQKFQGRVTMTRNTSISTAYMELSSLRS | |
| | | EDTAVYYCARGPYYYYMDVWGKGTMVTVSSASGGGGSGGRAS | |
| | | GGGGSEIVMTQSPLSLPVTPGEPASISCRSSQSLLYSNGYNYVDW | |
| | | YLQKPGQSPQLLIYLGSNRASGVPDRFSGSGSGTDFKLQISRVEA | |
| | | EDVGIYYCMQGRQFPYSFGQGTKVEIK | |
| BCMA-8 | VH | EVQLLETGGGLVQPGGSLRLSCAVSGFALSNHGMSVVVRRAPGK | 708 |
| | | GLEVVVSGIVYSGSTYYAASVKGRFTISRDNSRNTLYLQMNSLRPE | |
| | | DTAIYYCSAHGGESDVWGQGTTVTVSS | |
| | VL | EIVLTQSPATLSVSPGESATLSCRASQSVSSNLAVVYQQKPGQAPR | 709 |
| | | LLIYGASTRASGIPDRFSGSGSGTDFTLTISSLQAEDVAVYYCQQY | |
| | | GSSLTFGGGTKVEIK | |
| | scFv | EVQLLETGGGLVQPGGSLRLSCAVSGFALSNHGMSVVVRRAPGK | 710 |
| | | GLEVVVSGIVYSGSTYYAASVKGRFTISRDNSRNTLYLQMNSLRPE | |
| | | DTAIYYCSAHGGESDVWGQGTTVTVSSASGGGGSGGRASGGGG | |
| | | SEIVLTQSPATLSVSPGESATLSCRASQSVSSNLAVVYQQKPGQAP | |
| | | RLLIYGASTRASGIPDRFSGSGSGTDFTLTISSLQAEDVAVYYCQQ | |
| | | YGSSLTFGGGTKVEIK | |
| BCMA-9 | VH | EVQLVETGGGLVQPGGSLRLSCAVSGFALSNHGMSVVVRRAPGK | 711 |
| | | GLEVVVSGIVYSGSTYYAASVKGRFTISRDNSRNTLYLQMNSLRPE | |
| | | DTAIYYCSAHGGESDVWGQGTTVTVSS | |
| | VL | EIVMTQSPATLSVSPGERATLSCRASQSVSSKLAVVYQQKPGQAP | 712 |
| | | RLLMYGASIRATGIPDRFSGSGSGTEFTLTISSLEPEDFAVYYCQQ | |
| | | YGSSSVVTFGQGTKVEIK | |
| | scFv | EVQLVETGGGLVQPGGSLRLSCAVSGFALSNHGMSVVVRRAPGK | 713 |
| | | GLEVVVSGIVYSGSTYYAASVKGRFTISRDNSRNTLYLQMNSLRPE | |
| | | DTAIYYCSAHGGESDVWGQGTTVTVSSASGGGGSGGRASGGGG | |
| | | SEIVMTQSPATLSVSPGERATLSCRASQSVSSKLAVVYQQKPGQA | |
| | | PRLLMYGASIRATGIPDRFSGSGSGTEFTLTISSLEPEDFAVYYCQ | |
| | | QYGSSSVVTFGQGTKVEIK | |
| BCMA-10 | VH | EVQLVETGGGVVQPGGSLRLSCAVSGFALSNHGMSVVVRRAPGK | 714 |
| | | GLEVVVSGIVYSGSTYYAASVKGRFTISRDNSRNTLYLQMNSLRPE | |
| | | DTAIYYCSAHGGESDVWGQGTTVTVSS | |
| | VL | EIVLTQSPGTLSLSPGERATLSCRASQSVGSTNLAVVYQQKPGQAP | 715 |
| | | RLLIYDASNRATGIPDRFSGGGSGTDFTLTISRLEPEDFAVYYCQQ | |
| | | YGSSPPVVTFGQGTKVEIK | |
| | scFv | EVQLVETGGGVVQPGGSLRLSCAVSGFALSNHGMSVVVRRAPGK | 716 |
| | | GLEVVVSGIVYSGSTYYAASVKGRFTISRDNSRNTLYLQMNSLRPE | |
| | | DTAIYYCSAHGGESDVWGQGTTVTVSSASGGGGSGGRASGGGG | |
| | | SEIVLTQSPGTLSLSPGERATLSCRASQSVGSTNLAVVYQQKPGQA | |
| | | PRLLIYDASNRATGIPDRFSGGGSGTDFTLTISRLEPEDFAVYYCQ | |
| | | QYGSSPPVVTFGQGTKVEIK | |
| BCMA-11 | VH | QVQLVESGGGLVKPGGSLRLSCAASGFTFSDYYMSWIRQAPGKG | 717 |
| | | LEVVVSYISSSGSTIYYADSVKGRFTISRDNAKNSLYLQMNSLRAED | |
| | | TAVYYCARESGDGMDVWGQGTTVTVSS | |
| | VL | DIQMTQSPSSLSASVGDRVTITCRASQSISSYLNVVYQQKPGKAPK | 718 |
| | | LLIYAASSLQSGVPSRFSGSGSGTDFTLTISSLQPEDFATYYCQQS | |
| | | YTLAFGQGTKVDIK | |
| | scFv | QVQLVESGGGLVKPGGSLRLSCAASGFTFSDYYMSWIRQAPGKG | 719 |
| | | LEVVVSYISSSGSTIYYADSVKGRFTISRDNAKNSLYLQMNSLRAED | |
| | | TAVYYCARESGDGMDVWGQGTTVTVSSASGGGGSGGRASGGG | |
| | | GSDIQMTQSPSSLSASVGDRVTITCRASQSISSYLNVVYQQKPGKA | |
| | | PKLLIYAASSLQSGVPSRFSGSGSGTDFTLTISSLQPEDFATYYCQ | |
| | | QSYTLAFGQGTKVDIK | |
| BCMA-12 | VH | QVQLVQSGGGLVKPGGSLRLSCAASGFTFSDYYMSWIRQAPGKG | 720 |
| | | LEVVVSYISSSGNTIYYADSVKGRFTISRDNAKNSLYLQMNSLRAED | |
| | | TAVYYCARSTMVREDYWGQGTLVTVSS | |
| | VL | DIVLTQSPLSLPVTLGQPASISCKSSESLVHNSGKTYLNWFHQRPG | 721 |
| | | QSPRRLIYEVSNRDSGVPDRFTGSGSGTDFTLKISRVEAEDVGVY | |
| | | YCMQGTHVVPGTFGQGTKLEIK | |
| | scFv | QVQLVQSGGGLVKPGGSLRLSCAASGFTFSDYYMSWIRQAPGKG | 722 |
| | | LEVVVSYISSSGNTIYYADSVKGRFTISRDNAKNSLYLQMNSLRAED | |
| | | TAVYYCARSTMVREDYWGQGTLVTVSSASGGGGSGGRASGGG | |
| | | GSDIVLTQSPLSLPVTLGQPASISCKSSESLVHNSGKTYLNVVFHQR | |
| | | PGQSPRRLIYEVSNRDSGVPDRFTGSGSGTDFTLKISRVEAEDVG | |
| | | VYYCMQGTHVVPGTFGQGTKLEIK | |
| BCMA-13 | VH | QVQLVESGGGLVQPGGSLRLSCAVSGFALSNHGMSVVVRRAPGK | 723 |
| | | GLEVVVSGIVYSGSTYYAASVKGRFTISRDNSRNTLYLQMNSLRPE | |
| | | DTAIYYCSAHGGESDVWGQGTTVTVSS | |
| | VL | DIRLTQSPSPLSASVGDRVTITCQASEDINKFLNVVYHQTPGKAPKL | 724 |
| | | LIYDASTLQTGVPSRFSGSGSGTDFTLTINSLQPEDIGTYYCQQYE | |
| | | SLPLTFGGGTKVEIK | |
| | scFv | QVQLVESGGGLVQPGGSLRLSCAVSGFALSNHGMSVVVRRAPGK | 725 |
| | | GLEVVVSGIVYSGSTYYAASVKGRFTISRDNSRNTLYLQMNSLRPE | |
| | | DTAIYYCSAHGGESDVWGQGTTVTVSSASGGGGSGGRASGGGG | |
| | | SDIRLTQSPSPLSASVGDRVTITCQASEDINKFLNVVYHQTPGKAPK | |
| | | LLIYDASTLQTGVPSRFSGSGSGTDFTLTINSLQPEDIGTYYCQQY | |
| | | ESLPLTFGGGTKVEIK | |
| BCMA-14 | VH | EVQLVETGGGLVQPGGSLRLSCAVSGFALSNHGMSVVVRRAPGK | 711 |
| | | GLEVVVSGIVYSGSTYYAASVKGRFTISRDNSRNTLYLQMNSLRPE | |
| | | DTAIYYCSAHGGESDVWGQGTTVTVSS | |
| | VL | ETTLTQSPATLSVSPGERATLSCRASQSVGSNLAVVYQQKPGQGP | 726 |
| | | RLLIYGASTRATGIPARFSGSGSGTEFTLTISSLQPEDFAVYYCQQY | |
| | | NDWLPVTFGQGTKVEIK | |
| | scFv | EVQLVETGGGLVQPGGSLRLSCAVSGFALSNHGMSVVVRRAPGK | 727 |
| | | GLEVVVSGIVYSGSTYYAASVKGRFTISRDNSRNTLYLQMNSLRPE | |
| | | DTAIYYCSAHGGESDVWGQGTTVTVSSASGGGGSGGRASGGGG | |
| | | SETTLTQSPATLSVSPGERATLSCRASQSVGSNLAVVYQQKPGQG | |
| | | PRLLIYGASTRATGIPARFSGSGSGTEFTLTISSLQPEDFAVYYCQQ | |
| | | YNDWLPVTFGQGTKVEIK | |
| BCMA-15 | VH | EVQLVESGGGLVQPGGSLRLSCAVSGFALSNHGMSVVVRRAPGK | 687 |
| | | GLEVVVSGIVYSGSTYYAASVKGRFTISRDNSRNTLYLQMNSLRPE | |
| | | DTAIYYCSAHGGESDVWGQGTTVTVSS | |
| | VL | EIVLTQSPGTLSLSPGERATLSCRASQSIGSSSLAVVYQQKPGQAP | 728 |
| | | RLLMYGASSRASGIPDRFSGSGSGTDFTLTISRLEPEDFAVYYCQ | |
| | | QYAGSPPFTFGQGTKVEIK | |
| | scFv | EVQLVESGGGLVQPGGSLRLSCAVSGFALSNHGMSVVVRRAPGK | 729 |
| | | GLEVVVSGIVYSGSTYYAASVKGRFTISRDNSRNTLYLQMNSLRPE | |
| | | DTAIYYCSAHGGESDVWGQGTTVTVSSASGGGGSGGRASGGGG | |
| | | SEIVLTQSPGTLSLSPGERATLSCRASQSIGSSSLAVVYQQKPGQA | |
| | | PRLLMYGASSRASGIPDRFSGSGSGTDFTLTISRLEPEDFAVYYCQ | |
| | | QYAGSPPFTFGQGTKVEIK | |
| BCMA-16 | VH | QVQLQESGPGLVKPSETLSLTCTVSGGSISSSYYYWGWIRQPPGK | 730 |
| | | GLEWIGSIYYSGSAYYNPSLKSRVTISVDTSKNQFSLRLSSVTAAD | |
| | | TAVYYCARHWQEVVPDAFDIWGQGTMVTVSS | |
| | VL | ETTLTQSPAFMSATPGDKVIISCKASQDIDDAMNVVYQQKPGEAPL | 731 |
| | | FIIQSATSPVPGIPPRFSGSGFGTDFSLTINNIESEDAAYYFCLQHD | |
| | | NFPLTFGQGTKLEIK | |
| | scFv | QVQLQESGPGLVKPSETLSLTCTVSGGSISSSYYYWGWIRQPPGK | 732 |
| | | GLEWIGSIYYSGSAYYNPSLKSRVTISVDTSKNQFSLRLSSVTAAD | |
| | | TAVYYCARHWQEWPDAFDIWGQGTMVTVSSGGGGSGGGGSGG | |
| | | GGSETTLTQSPAFMSATPGDKVIISCKASQDIDDAMNVVYQQKPGE | |
| | | APLFIIQSATSPVPGIPPRFSGSGFGTDFSLTINNIESEDAAYYFCLQ | |
| | | HDNFPLTFGQGTKLEIK | |
| BCMA-17 | VH | QVNLRESGPALVKPTQTLTLTCTFSGFSLRTSGMCVSWIRQPPGK | |
| | | ALEVVLARIDVVDEDKFYSTSLKTRLTISKDTSDNQVVLRMTNMDPA | |
| | | DTATYYCARSGAGGTSATAFDIWGPGTMVTVSS | 733 |
| | VL | DIQMTQSPSSLSASVGDRVTITCRASQDIYNNLAVVFQLKPGSAPR | |
| | | SLMYAANKSQSGVPSRFSGSASGTDFTLTISSLQPEDFATYYCQH | |
| | | YYRFPYSFGQGTKLEIK | 734 |
| | scFv | VNLRESGPALVKPTQTLTLTCTFSGFSLRTSGMCVSWIRQPPGKA | |
| | | LEWLARIDWDEDKFYSTSLKTRLTISKDTSDNQVVLRMTNMDPAD | |
| | | TATYYCARSGAGGTSATAFDIWGPGTMVTVSSGGGGSGGGGSG | |
| | | GGGSDIQMTQSPSSLSASVGDRVTITCRASQDIYNNLAVVFQLKPG | |
| | | SAPRSLMYAANKSQSGVPSRFSGSASGTDFTLTISSLQPEDFATY | |
| | | YCQHYYRFPYSFGQGTKLEIK | 735 |
| BCMA-18 | VH | EVQLVESGGGLVKPGGSLRLSCAASGFTFSSYSMNVVVRQAPGK | |
| | | GLEVVVSSISSSSSYIYYADSVKGRFTISRDNAKNSLYLQMNSLRAE | |
| | | DTAVYYCAKTIAAVYAFDIWGQGTTVTVSS | 736 |
| | VL | EIVLTQSPLSLPVTPEEPASISCRSSQSLLHSNGYNYLDVVYLQKPG | |
| | | QSPQLLIYLGSNRASGVPDRFSGSGSGTDFTLKISRVEAEDVGVY | |
| | | YCMQALQTPYTFGQGTKLEIK | 737 |
| | scFv | EVQLVESGGGLVKPGGSLRLSCAASGFTFSSYSMNVVVRQAPGK | |
| | | GLEVVVSSISSSSSYIYYADSVKGRFTISRDNAKNSLYLQMNSLRAE | |
| | | DTAVYYCAKTIAAVYAFDIWGQGTTVTVSSGGGGSGGGGSGGGG | |
| | | SEIVLTQSPLSLPVTPEEPASISCRSSQSLLHSNGYNYLDVVYLQKP | |
| | | GQSPQLLIYLGSNRASGVPDRFSGSGSGTDFTLKISRVEAEDVGV | |
| | | YYCMQALQTPYTFGQGTKLEIK | 738 |
| BCMA-19 | VH | EVQLVESGGGLVKPGGSLRLSCAASGFTFSDYYMSWIRQAPGKG | |
| | | LEVVVSYISSSGSTIYYADSVKGRFTISRDNAKNSLYLQMNSLRAED | |
| | | TAVYYCARDLRGAFDIWGQGTMVTVSS | 739 |
| | VL | SYVLTQSPSVSAAPGYTATISCGGNNIGTKSVHVVYQQKPGQAPLL | |
| | | VIRDDSVRPSKIPGRFSGSNSGNMATLTISGVQAGDEADFYCQVW | |
| | | DSDSEHVVFGGGTKLTVL | 740 |
| | scFv | EVQLVESGGGLVKPGGSLRLSCAASGFTFSDYYMSWIRQAPGKG | |
| | | LEVVVSYISSSGSTIYYADSVKGRFTISRDNAKNSLYLQMNSLRAED | |
| | | TAVYYCARDLRGAFDIWGQGTMVTVSSGGGGSGGGGSGGGGSS | |
| | | YVLTQSPSVSAAPGYTATISCGGNNIGTKSVHVVYQQKPGQAPLLVI | |
| | | RDDSVRPSKIPGRFSGSNSGNMATLTISGVQAGDEADFYCQVVVD | |
| | | SDSEHVVFGGGTKLTVL | 741 |
| BCMA-20 | VH | QVQLVQSGAEVKKPGASVKVSCKPSGYTVTSHYIHVVVRRAPGQG | |
| | | LEWMGMINPSGGVTAYSQTLQGRVTMTSDTSSSTVYMELSSLRS | |
| | | EDTAMYYCAREGSGSGVVYFDFWGRGTLVTVSS | 742 |
| | VL | SYVLTQPPSVSVSPGQTASITCSGDGLSKKYVSVVYQQKAGQSPV | |
| | | VLISRDKERPSGIPDRFSGSNSADTATLTISGTQAMDEADYYCQA | |
| | | WDDTTVVFGGGTKLTVL | 743 |
| | scFv | QVQLVQSGAEVKKPGASVKVSCKPSGYTVTSHYIHVVVRRAPGQG | |
| | | LEWMGMINPSGGVTAYSQTLQGRVTMTSDTSSSTVYMELSSLRS | |
| | | EDTAMYYCAREGSGSGVVYFDFWGRGTLVTVSSGGGGSGGGGS | |
| | | GGGGSSYVLTQPPSVSVSPGQTASITCSGDGLSKKYVSVVYQQKA | |
| | | GQSPVVLISRDKERPSGIPDRFSGSNSADTATLTISGTQAMDEADY | |
| | | YCQAWDDTTVVFGGGTKLTVL | 744 |
| BCMA-21 | VH | QVQLQESGPGLVKPSQTLSLTCTVSGGSISSGGYYWSWIRQHPG | |
| | | KGLEWIGYIYYSGSTYYNPSLKSRVTISVDTSKNQFSLKLSSVTAAD | |
| | | TAVYYCARAGIAARLRGAFDIWGQGTMVTVSS | 745 |
| | VL | DIVMTQSPSSVSASVGDRVIITCRASQGIRNVVLAVVYQQKPGKAPN | |
| | | LLIYAASNLQSGVPSRFSGSGSGADFTLTISSLQPEDVATYYCQKY | |
| | | NSAPFTFGPGTKVDIK | 746 |
| | scFv | QVQLQESGPGLVKPSQTLSLTCTVSGGSISSGGYYWSWIRQHPG | |
| | | KGLEWIGYIYYSGSTYYNPSLKSRVTISVDTSKNQFSLKLSSVTAAD | |
| | | TAVYYCARAGIAARLRGAFDIWGQGTMVTVSSGGGGSGGGGSG | |
| | | GGGSDIVMTQSPSSVSASVGDRVIITCRASQGIRNVVLAVVYQQKPG | |
| | | KAPNLLIYAASNLQSGVPSRFSGSGSGADFTLTISSLQPEDVATYY | |
| | | CQKYNSAPFTFGPGTKVDIK | 747 |
| BCMA-22 | VH | QVQLVQSGAEVKKPGSSVKVSCKASGGTFSSYAISVVVRQAPGQG | |
| | | LEWMGGIIPIFGTANYAQKFQGRVTITADESTSTAYMELSSLRSED | |
| | | TAVYYCARRGGYQLLRWDVGLLRSAFDIWGQGTMVTVSS | 748 |
| | VL | SYVLTQPPSVSVAPGQTARITCGGNNIGSKSVHVVYQQKPGQAPV | |
| | | LVLYGKNNRPSGVPDRFSGSRSGTTASLTITGAQAEDEADYYCSS | |
| | | RDSSGDHLRVFGTGTKVTVL | 749 |
| | scFv | QVQLVQSGAEVKKPGSSVKVSCKASGGTFSSYAISVVVRQAPGQG | 750 |
| | | LEWMGGIIPIFGTANYAQKFQGRVTITADESTSTAYMELSSLRSED | |
| | | TAVYYCARRGGYQLLRWDVGLLRSAFDIWGQGTMVTVSSGGGG | |
| | | SGGGGSGGGGSSYVLTQPPSVSVAPGQTARITCGGNNIGSKSVH | |
| | | VVYQQKPGQAPVLVLYGKNNRPSGVPDRFSGSRSGTTASLTITGA | |
| | | QAEDEADYYCSSRDSSGDHLRVFGTGTKVTVL | |
| BCMA-23 | VH | EVQLQQSGPGLVKPSQTLSLTCAISGDSVSSNSAAVVNWIRQSPSR | |
| | | GLEVVLGRTYYRSKVVYSFYAISLKSRIIINPDTSKNQFSLQLKSVTPE | |
| | | DTAVYYCARSSPEGLFLYVVFDPWGQGTLVTVSS | 751 |
| | VL | SSELTQDPAVSVALGQTIRITCQGDSLGNYYATVVYQQKPGQAPVL | |
| | | VIYGTNNRPSGIPDRFSASSSGNTASLTITGAQAEDEADYYCNSRD | |
| | | SSGHHLLFGTGTKVTVL | 752 |
| | ScFv | EVQLQQSGPGLVKPSQTLSLTCAISGDSVSSNSAAVVNWIRQSPSR | |
| | | GLEVVLGRTYYRSKVVYSFYAISLKSRIIINPDTSKNQFSLQLKSVTPE | |
| | | DTAVYYCARSSPEGLFLYWFDPWGQGTLVTVSSGGDGSGGGGS | |
| | | GGGGSSSELTQDPAVSVALGQTIRITCQGDSLGNYYATVVYQQKP | |
| | | GQAPVLVIYGTNNRPSGIPDRFSASSSGNTASLTITGAQAEDEADY | |
| | | YCNSRDSSGHHLLFGTGTKVTVL | 753 |
| BCMA-24 | VH | EVQLVESGGGLVQPGGSLRLSCAASGFTFSSYAMSVVVRQAPGK | |
| | | GLEVVVSAISGSGGSTYYADSVKGRFTISRDNSKNTLYLQMNSLRA | |
| | | EDTAVYYCAKVEGSGSLDYWGQGTLVTVSS | 754 |
| | VL | EIVMTQSPGTLSLSPGERATLSCRASQSVSSAYLAVVYQQKPGQP | |
| | | PRLLISGASTRATGIPDRFGGSGSGTDFTLTISRLEPEDFAVYYCQ | |
| | | HYGSSFNGSSLFTFGQGTRLEIK | 755 |
| | scFv | EVQLVESGGGLVQPGGSLRLSCAASGFTFSSYAMSVVVRQAPGK | |
| | | GLEVVVSAISGSGGSTYYADSVKGRFTISRDNSKNTLYLQMNSLRA | |
| | | EDTAVYYCAKVEGSGSLDYWGQGTLVTVSSGGGGSGGGGSGG | |
| | | GGSEIVMTQSPGTLSLSPGERATLSCRASQSVSSAYLAVVYQQKP | |
| | | GQPPRLLISGASTRATGIPDRFGGSGSGTDFTLTISRLEPEDFAVY | |
| | | YCQHYGSSFNGSSLFTFGQGTRLEIK | 756 |
| | VH | EVQLVETGGGLVQPGGSLRLSCAASGITFSRYPMSVVVRQAPGKG | |
| | | LEVVVSGISDSGVSTYYADSAKGRFTISRDNSKNTLFLQMSSLRDE | |
| | | DTAVYYCVTRAGSEASDIWGQGTMVTVSS | 757 |
| BCMA-25 | VL | EIVLTQSPATLSLSPGERATLSCRASQSVSNSLAVVYQQKPGQAPR | |
| | | LLIYDASSRATGIPDRFSGSGSGTDFTLTISRLEPEDFAIYYCQQFG | 758 |
| | | TSSGLTFGGGTKLEIK | |
| | scFv | EVQLVETGGGLVQPGGSLRLSCAASGITFSRYPMSVVVRQAPGKG | |
| | | LEVVVSGISDSGVSTYYADSAKGRFTISRDNSKNTLFLQMSSLRDE | |
| | | DTAVYYCVTRAGSEASDIWGQGTMVTVSSGGGGSGGGGSGGG | |
| | | GSEIVLTQSPATLSLSPGERATLSCRASQSVSNSLAVVYQQKPGQA | |
| | | PRLLIYDASSRATGIPDRFSGSGSGTDFTLTISRLEPEDFAIYYCQQ | |
| | | FGTSSGLTFGGGTKLEIK | 759 |
| BCMA-26 | VH | QVQLVESGGGLVQPGGSLRLSCAASGFTFSSYAMSVVVRQAPGK | |
| | | GLEVVVSAISGSGGSTYYADSVKGRFTISRDNAKNSLYLQMNSLRA | |
| | | EDTAIYYCARATYKRELRYYYGMDVWGQGTMVTVSS | 760 |
| | VL | EIVMTQSPGTVSLSPGERATLSCRASQSVSSSFLAVVYQQKPGQA | |
| | | PRLLIYGASSRATGIPDRFSGSGSGTDFTLTISRLEPEDSAVYYCQ | |
| | | QYHSSPSVVTFGQGTRLEIK | 761 |
| | scFv | QVQLVESGGGLVQPGGSLRLSCAASGFTFSSYAMSVVVRQAPGK | |
| | | GLEVVVSAISGSGGSTYYADSVKGRFTISRDNAKNSLYLQMNSLRA | |
| | | EDTAIYYCARATYKRELRYYYGMDVWGQGTMVTVSSGGGGSGG | |
| | | GGSGGGGSEIVMTQSPGTVSLSPGERATLSCRASQSVSSSFLAW | 762 |
| | | YQQKPGQAPRLLIYGASSRATGIPDRFSGSGSGTDFTLTISRLEPE | |
| | | DSAVYYCQQYHSSPSVVTFGQGTRLEIK | |
| BCMA-27 | VH | EVQLVETGGGLVQPGGSLRLSCAASGFTFSSYAMSVVVRQAPGK | |
| | | GLEVVVSAISGSGGSTYYADSVKGRFTISRDNSKNTLYLQMNTLKA | |
| | | EDTAVYYCARATYKRELRYYYGMDVWGQGTTVTVSS | 763 |
| | VL | EIVLTQSPSTLSLSPGESATLSCRASQSVSTTFLAVVYQQKPGQAP | |
| | | RLLIYGSSNRATGIPDRFSGSGSGTDFTLTIRRLEPEDFAVYYCQQ | |
| | | YHSSPSVVTFGQGTKVEIK | 764 |
| | scFv | EVQLVETGGGLVQPGGSLRLSCAASGFTFSSYAMSVVVRQAPGK | |
| | | GLEVVVSAISGSGGSTYYADSVKGRFTISRDNSKNTLYLQMNTLKA | |
| | | EDTAVYYCARATYKRELRYYYGMDVWGQGTTVTVSSGGGGSGG | |
| | | GGSGGGGSEIVLTQSPSTLSLSPGESATLSCRASQSVSTTFLAVVY | |
| | | QQKPGQAPRLLIYGSSNRATGIPDRFSGSGSGTDFTLTIRRLEPED | |
| | | FAVYYCQQYHSSPSVVTFGQGTKVEIK | 765 |
| BCMA-28 | VH | EVQLVETGGGLVQPGRSLRLSCAASGFTFDDYAMHVVVRQAPGK | |
| | | GLEVVVSGISWNSGSIGYADSVKGRFTISRDNAKNSLYLQMNSLRD | |
| | | EDTAVYYCARVGKAVPDVWGQGTTVTVSS | 766 |
| | VL | DIVMTQTPSSLSASVGDRVTITCRASQSISSYLNVVYQQKPGKAPKL | |
| | | LIYAASSLQSGVPSRFSGSGSGTDFTLTISSLQPEDFATYYCQQSY | |
| | | STPYSFGQGTRLEIK | 767 |
| | scFv | EVQLVETGGGLVQPGRSLRLSCAASGFTFDDYAMHVVVRQAPGK | |
| | | GLEVVVSGISWNSGSIGYADSVKGRFTISRDNAKNSLYLQMNSLRD | |
| | | EDTAVYYCARVGKAVPDVWGQGTTVTVSSGGGGSGGGGSGGG | |
| | | GSDIVMTQTPSSLSASVGDRVTITCRASQSISSYLNVVYQQKPGKA | |
| | | PKLLIYAASSLQSGVPSRFSGSGSGTDFTLTISSLQPEDFATYYCQ | |
| | | QSYSTPYSFGQGTRLEIK | 768 |
| BCMA-29 | VH | EVQLVESGGGLVQPGRSLRLSCTASGFTFDDYAMHVVVRQRPGK | |
| | | GLEVVVASINWKGNSLAYGDSVKGRFAISRDNAKNTVFLQMNSLRT | |
| | | EDTAVYYCASHQGVAYYNYAMDVWGRGTLVTVSS | 769 |
| | VL | EIVLTQSPGTLSLSPGERATLSCRATQSIGSSFLAVVYQQRPGQAP | |
| | | RLLIYGASQRATGIPDRFSGRGSGTDFTLTISRVEPEDSAVYYCQH | |
| | | YESSPSVVTFGQGTKVEIK | 770 |
| | scFv | EVQLVESGGGLVQPGRSLRLSCTASGFTFDDYAMHVVVRQRPGK | |
| | | GLEVVVASINWKGNSLAYGDSVKGRFAISRDNAKNTVFLQMNSLRT | |
| | | EDTAVYYCASHQGVAYYNYAMDVWGRGTLVTVSSGGGGSGGG | |
| | | GSGGGGSEIVLTQSPGTLSLSPGERATLSCRATQSIGSSFLAVVYQ | |
| | | QRPGQAPRLLIYGASQRATGIPDRFSGRGSGTDFTLTISRVEPEDS | |
| | | AVYYCQHYESSPSVVTFGQGTKVEIK | 771 |
| BCMA-30 | VH | EVQLVESGGGLVQPGGSLRLSCAASGFTFSSYAMSVVVRQAPGK | |
| | | GLEVVVSAISGSGGSTYYADSVKGRFTISRDNSKNTLYLQMNSLRA | |
| | | EDTAVYYCAKVVRDGMDVWGQGTTVTVSS | 772 |
| | VL | EIVLTQSPATLSLSPGERATLSCRASQSVSSSYLAVVYQQKPGQAP | |
| | | RLLIYGASSRATGIPDRFSGNGSGTDFTLTISRLEPEDFAVYYCQQ | |
| | | YGSPPRFTFGPGTKVDIK | 773 |
| | scFv | EVQLVESGGGLVQPGGSLRLSCAASGFTFSSYAMSVVVRQAPGK | |
| | | GLEVVVSAISGSGGSTYYADSVKGRFTISRDNSKNTLYLQMNSLRA | |
| | | EDTAVYYCAKVVRDGMDVWGQGTTVTVSSGGGGSGGGGSGGG | |
| | | GSEIVLTQSPATLSLSPGERATLSCRASQSVSSSYLAVVYQQKPGQ | |
| | | APRLLIYGASSRATGIPDRFSGNGSGTDFTLTISRLEPEDFAVYYC | |
| | | QQYGSPPRFTFGPGTKVDIK | 774 |
| BCMA-31 | VH | EVQLLESGGGLVQPGGSLRLSCAASGFTFSSYAMSVVVRQAPGKG | |
| | | LEVVVSAISGSGGSTYYADSVKGRFTISRDNSKNTLYLQMNSLRAE | 775 |
| | | DTAVYYCAKIPQTGTFDYWGQGTLVTVSS | |
| | VL | EIVLTQSPGTLSLSPGERATLSCRASQSVSSSYLAVVYQQRPGQAP | |
| | | RLLIYGASSRATGIPDRFSGSGSGTDFTLTISRLEPEDFAVYYCQH | |
| | | YGSSPSVVTFGQGTRLEIK | 776 |
| | scFv | EVQLLESGGGLVQPGGSLRLSCAASGFTFSSYAMSVVVRQAPGKG | |
| | | LEVVVSAISGSGGSTYYADSVKGRFTISRDNSKNTLYLQMNSLRAE | |
| | | DTAVYYCAKIPQTGTFDYWGQGTLVTVSSGGGGSGGGGSGGGG | |
| | | SEIVLTQSPGTLSLSPGERATLSCRASQSVSSSYLAVVYQQRPGQA | |
| | | PRLLIYGASSRATGIPDRFSGSGSGTDFTLTISRLEPEDFAVYYCQ | |
| | | HYGSSPSVVTFGQGTRLEIK | 777 |
| BCMA-32 | VH | EVQLVETGGGLVQPGGSLRLSCAASGFTFSSYAMSVVVRQAPGK | |
| | | GLEVVVSAISGSGGSTYYADSVKGRFTMSRENDKNSVFLQMNSLR | |
| | | VEDTGVYYCARANYKRELRYYYGMDVWGQGTMVTVSS | 778 |
| | VL | EIVMTQSPGTLSLSPGESATLSCRASQRVASNYLAVVYQHKPGQA | |
| | | PSLLISGASSRATGVPDRFSGSGSGTDFTLAISRLEPEDSAVYYCQ | |
| | | HYDSSPSVVTFGQGTKVEIK | 779 |
| | scFv | EVQLVETGGGLVQPGGSLRLSCAASGFTFSSYAMSVVVRQAPGK | |
| | | GLEVVVSAISGSGGSTYYADSVKGRFTMSRENDKNSVFLQMNSLR | |
| | | VEDTGVYYCARANYKRELRYYYGMDVWGQGTMVTVSSGGGGS | |
| | | GGGGSGGGGSEIVMTQSPGTLSLSPGESATLSCRASQRVASNYL | |
| | | AVVYQHKPGQAPSLLISGASSRATGVPDRFSGSGSGTDFTLAISRL | |
| | | EPEDSAVYYCQHYDSSPSVVTFGQGTKVEIK | 780 |
| BCMA-33 | VH | EVQLLETGGGLVQPGGSLRLSCAASGFSFSSYAMSVVVRQAPGKG | |
| | | LEVVVSAISGSGGSTYYADSVKGRFTISRDNSKNTLYLQMNSLRAE | |
| | | DTAVYYCAKALVGATGAFDIWGQGTLVTVSS | 781 |
| | VL | EIVLTQSPGTLSLSPGERATLSCRASQSLSSNFLAVVYQQKPGQAP | |
| | | GLLIYGASNWATGTPDRFSGSGSGTDFTLTITRLEPEDFAVYYCQY | |
| | | YGTSPMYTFGQGTKVEIK | 782 |
| | scFv | EVQLLETGGGLVQPGGSLRLSCAASGFSFSSYAMSVVVRQAPGKG | |
| | | LEVVVSAISGSGGSTYYADSVKGRFTISRDNSKNTLYLQMNSLRAE | |
| | | DTAVYYCAKALVGATGAFDIWGQGTLVTVSSGGGGSGGGGSGG | |
| | | GGSEIVLTQSPGTLSLSPGERATLSCRASQSLSSNFLAVVYQQKPG | |
| | | QAPGLLIYGASNWATGTPDRFSGSGSGTDFTLTITRLEPEDFAVYY | |
| | | CQYYGTSPMYTFGQGTKVEIK | 783 |
| BCMA-34 | VH | EVQLLESGGGLVQPGGSLRLSCAASGFTFSSYAMSVVVRQAPGKG | |
| | | LEVVVSAISGSGGSTYYADSVKGRFTISRDNSKNTLYLQMNSLRAE | |
| | | DTAVYYCVLVVFGEGFDPWGQGTLVTVSS | 784 |
| | VL | DIVLTQSPLSLPVTPGEPASISCRSSQSLLHSNGYNYLDVVYLQKPG | |
| | | QSPQLLIYLGSNRASGVPDRFSGSGSGTDFTLKISRVEAEDVGVY | |
| | | YCMQALQTPLTFGGGTKVDIK | 785 |
| | scFv | EVQLLESGGGLVQPGGSLRLSCAASGFTFSSYAMSVVVRQAPGKG | |
| | | LEVVVSAISGSGGSTYYADSVKGRFTISRDNSKNTLYLQMNSLRAE | |
| | | DTAVYYCVLVVFGEGFDPWGQGTLVTVSSGGGGSGGGGSGGGG | |
| | | SDIVLTQSPLSLPVTPGEPASISCRSSQSLLHSNGYNYLDVVYLQKP | |
| | | GQSPQLLIYLGSNRASGVPDRFSGSGSGTDFTLKISRVEAEDVGV | |
| | | YYCMQALQTPLTFGGGTKVDIK | 786 |
| BCMA-35 | VH | QVQLVESGGGLVQPGGSLRLSCAASGFTFSSYAMSVVVRQAPGK | |
| | | GLEVVVSAISGSGGSTYYADSVKGRFTISRDNSKNTLYLQMNSLRA | |
| | | EDTAVYYCAKVGYDSSGYYRDYYGMDVWGQGTTVTVSS | 787 |
| | VL | EIVLTQSPGTLSLSPGERATLSCRASQSVSSSYLAVVYQQKPGQAP | |
| | | RLLIYGTSSRATGISDRFSGSGSGTDFTLTISRLEPEDFAVYYCQHY | |
| | | GNSPPKFTFGPGTKLEIK | 788 |
| | scFv | QVQLVESGGGLVQPGGSLRLSCAASGFTFSSYAMSVVVRQAPGK | |
| | | GLEVVVSAISGSGGSTYYADSVKGRFTISRDNSKNTLYLQMNSLRA | |
| | | EDTAVYYCAKVGYDSSGYYRDYYGMDVWGQGTTVTVSSGGGGS | |
| | | GGGGSGGGGSEIVLTQSPGTLSLSPGERATLSCRASQSVSSSYLA | |
| | | VVYQQKPGQAPRLLIYGTSSRATGISDRFSGSGSGTDFTLTISRLEP | |
| | | EDFAVYYCQHYGNSPPKFTFGPGTKLEIK | 789 |
| BCMA-36 | VH | EVQLVESGGGLVQPGGSLRLSCAASGFTFSSYAMSVVVRQAPGK | |
| | | GLEVVVSAISGSGGSTYYADSVKGRFTISRDNSKNTLYLQMNSLRA | |
| | | EDTAVYYCAKMGWSSGYLGAFDIWGQGTTVTVSS | 790 |
| | VL | EIVLTQSPGTLSLSPGERATLSCRASQSVASSFLAVVYQQKPGQAP | |
| | | RLLIYGASGRATGIPDRFSGSGSGTDFTLTISRLEPEDFAVYYCQH | |
| | | YGGSPRLTFGGGTKVDIK | 791 |
| | scFv | EVQLVESGGGLVQPGGSLRLSCAASGFTFSSYAMSVVVRQAPGK | |
| | | GLEVVVSAISGSGGSTYYADSVKGRFTISRDNSKNTLYLQMNSLRA | |
| | | EDTAVYYCAKMGWSSGYLGAFDIWGQGTTVTVSSGGGGSGGGG | |
| | | SGGGGSEIVLTQSPGTLSLSPGERATLSCRASQSVASSFLAVVYQQ | |
| | | KPGQAPRLLIYGASGRATGIPDRFSGSGSGTDFTLTISRLEPEDFA | |
| | | VYYCQHYGGSPRLTFGGGTKVDIK | 792 |
| BCMA-37 | VH | QIQLVQSGPDLKKPGETVKLSCKASGYTFTNFGMNVVVKQAPGKG | |
| | | FKWMAWINTYTGESYFADDFKGRFAFSVETSATTAYLQINNLKTE | |
| | | DTATYFCARGEIYYGYDGGFAYWGQGTLVTVSA | 793 |
| | VL | DVVMTQSHRFMSTSVGDRVSITCRASQDVNTAVSVVYQQKPGQS | |
| | | PKLLIFSASYRYTGVPDRFTGSGSGADFTLTISSVQAEDLAVYYCQ | |
| | | QHYSTPVVTFGGGTKLDIK | 794 |
| | scFv | QIQLVQSGPDLKKPGETVKLSCKASGYTFTNFGMNVVVKQAPGKG | |
| | | FKWMAWINTYTGESYFADDFKGRFAFSVETSATTAYLQINNLKTE | |
| | | DTATYFCARGEIYYGYDGGFAYWGQGTLVTVSAGGGGSGGGGS | |
| | | GGGGSDVVMTQSHRFMSTSVGDRVSITCRASQDVNTAVSVVYQQ | |
| | | KPGQSPKLLIFSASYRYTGVPDRFTGSGSGADFTLTISSVQAEDLA | |
| | | VYYCQQHYSTPVVTFGGGTKLDIK | 795 |
| BCMA-38 | VH | QIQLVQSGPELKKPGETVKISCKASGYTFTDYSINVVVKRAPGKGLK | |
| | | WMGWINTETREPAYAYDFRGRFAFSLETSASTAYLQINNLKYEDT | |
| | | ATYFCALDYSYAMDYWGQGTSVTVSS | 796 |
| | VL | DIVLTQSPASLAMSLGKRATISCRASESVSVIGAHLIHVVYQQKPGQ | |
| | | PPKLLIYLASNLETGVPARFSGSGSGTDFTLTIDPVEEDDVAIYSCL | |
| | | QSRIFPRTFGGGTKLEIK | 797 |
| | scFv | QIQLVQSGPELKKPGETVKISCKASGYTFTDYSINVVVKRAPGKGLK | |
| | | WMGWINTETREPAYAYDFRGRFAFSLETSASTAYLQINNLKYEDT | |
| | | ATYFCALDYSYAMDYWGQGTSVTVSSGGGGSGGGGSGGGGSQI | |
| | | QLVQSGPELKKPGETVKISCKASGYTFTDYSINVVVKRAPGKGLKW | |
| | | MGWINTETREPAYAYDFRGRFAFSLETSASTAYLQINNLKYEDTAT | |
| | | YFCALDYSYAMDYWGQGTSVTVSS | 798 |
| BCMA-39 | VH | QIQLVQSGPELKKPGETVKISCKASGYTFRHYSMNVVVKQAPGKGL | |
| | | KVVMGRINTESGVPIYADDFKGRFAFSVETSASTAYLVINNLKDEDT | |
| | | ASYFCSNDYLYSLDFWGQGTALTVSS | 799 |
| | VL | DIVLTQSPPSLAMSLGKRATISCRASESVTILGSHLIYVVYQQKPGQ | |
| | | PPTLLIQLASNVQTGVPARFSGSGSRTDFTLTIDPVEEDDVAVYYC | |
| | | LQSRTIPRTFGGGTKLEIK | 800 |
| | scFv | QIQLVQSGPELKKPGETVKISCKASGYTFRHYSMNVVVKQAPGKGL | |
| | | KVVMGRINTESGVPIYADDFKGRFAFSVETSASTAYLVINNLKDEDT | |
| | | ASYFCSNDYLYSLDFWGQGTALTVSSGGGGSGGGGSGGGGSDI | |
| | | VLTQSPPSLAMSLGKRATISCRASESVTILGSHLIYWYQQKPGQPP | |
| | | TLLIQLASNVQTGVPARFSGSGSRTDFTLTIDPVEEDDVAVYYCLQ | |
| | | SRTIPRTFGGGTKLEIK | 801 |
| BCMA-40 | VH | QIQLVQSGPELKKPGETVKISCKASGYTFTHYSMNVVVKQAPGKGL | |
| | | KVVMGRINTETGEPLYADDFKGRFAFSLETSASTAYLVINNLKNEDT | |
| | | ATFFCSNDYLYSCDYWGQGTTLTVSS | 802 |
| | VL | DIVLTQSPPSLAMSLGKRATISCRASESVTILGSHLIYVVYQQKPGQ | |
| | | PPTLLIQLASNVQTGVPARFSGSGSRTDFTLTIDPVEEDDVAVYYC | |
| | | LQSRTIPRTFGGGTKLEIK | 800 |
| | scFv | QIQLVQSGPELKKPGETVKISCKASGYTFTHYSMNVVVKQAPGKGL | |
| | | KVVMGRINTETGEPLYADDFKGRFAFSLETSASTAYLVINNLKNEDT | |
| | | ATFFCSNDYLYSCDYWGQGTTLTVSSGGGGSGGGGSGGGGSDI | |
| | | VLTQSPPSLAMSLGKRATISCRASESVTILGSHLIYWYQQKPGQPP | |
| | | TLLIQLASNVQTGVPARFSGSGSRTDFTLTIDPVEEDDVAVYYCLQ | |
| | | SRTIPRTFGGGTKLEIK | 803 |

TABLE 16B
BCMA Binders - Light chain CDR sequences according to Kabat numbering
scheme

| | | SEQ ID | | SEQ ID | | SEQ ID |
|---|---|---|---|---|---|---|
| Antibody | CDR-L1 | NO: | CDR-L2 | NO: | CDR-L3 | NO: |
| BCMA-1 | RASQSISSYLN | 804 | AASSLQS | 836 | QQSYSTPYT | 865 |
| BCMA-2 | RASQSISSSFLA | 805 | GASRRAT | 837 | QQYHSSPSVVT | 866 |
| BCMA-3 | RSSQSLLHSNGYNYLD | 806 | LGSNRAS | 838 | MQALQTPYT | 867 |
| BCMA-4 | KSSQSLLRNDGKTPLY | 807 | EVSNRFS | 839 | MQNIQFPS | 868 |
| BCMA-5 | RSSQSLLHSNGYNYLN | 808 | LGSKRAS | 840 | MQALQTPYT | 867 |
| BCMA-6 | RASQSISSYLN | 804 | GASTLAS | 841 | QQSYKRAS | 869 |
| BCMA-7 | RSSQSLLYSNGYNYVD | 809 | LGSNRAS | 838 | MQGRQFPYS | 870 |
| BCMA-8 | RASQSVSSNLA | 810 | GASTRAS | 842 | QQYGSSLT | 871 |
| BCMA-9 | RASQSVSSKLA | 811 | GASIRAT | 843 | QQYGSSSVVT | 872 |
| BCMA-10 | RASQSVGSTNLA | 812 | DASNRAT | 684 | QQYGSSPPVVT | 873 |
| BCMA-11 | RASQSISSYLN | 804 | AASSLQS | 836 | QQSYTLA | 874 |
| BCMA-12 | KSSESLVHNSGKTYLN | 813 | EVSNRDS | 844 | MQGTHWPGT | 875 |
| BCMA-13 | QASEDINKFLN | 814 | DASTLQT | 845 | QQYESLPLT | 876 |
| BCMA-14 | RASQSVGSNLA | 815 | GASTRAT | 846 | QQYNDVVLPVT | 877 |
| BCMA-15 | RASQSIGSSSLA | 816 | GASSRAS | 847 | QQYAGSPPFT | 878 |
| BCMA-16 | KASQDIDDAMN | 817 | SATSPVP | 848 | LQHDNFPLT | 879 |
| BCMA-17 | RASQDIYNNLA | 818 | AANKSQS | 849 | QHYYRFPYS | 880 |
| BCMA-18 | RSSQSLLHSNGYNYLD | 806 | LGSNRAS | 838 | MQALQTPYT | 867 |
| BCMA-19 | GGNNIGTKSVH | 819 | DDSVRPS | 850 | QVVVDSDSEHVV | 881 |
| BCMA-20 | SGDGLSKKYVS | 820 | RDKERPS | 851 | QAVVDDTTVV | 882 |
| BCMA-21 | RASQGIRNVVLA | 821 | AASNLQS | 852 | QKYNSAPFT | 883 |
| BCMA-22 | GGNNIGSKSVH | 822 | GKNNRPS | 853 | SSRDSSGDHLRV | 884 |
| BCMA-23 | QGDSLGNYYAT | 823 | GTNNRPS | 854 | NSRDSSGHHLL | 885 |
| BCMA-24 | RASQSVSSAYLA | 824 | GASTRAT | 846 | QHYGSSFNGSSLFT | 886 |
| BCMA-25 | RASQSVSNSLA | 825 | DASSRAT | 855 | QQFGTSSGLT | 887 |
| BCMA-26 | RASQSVSSSFLA | 826 | GASSRAT | 856 | QQYHSSPSVVT | 866 |
| BCMA-27 | RASQSVSTTFLA | 827 | GSSNRAT | 857 | QQYHSSPSVVT | 866 |
| BCMA-28 | RASQSISSYLN | 804 | AASSLQS | 836 | QQSYSTPYS | 888 |
| BCMA-29 | RATQSIGSSFLA | 828 | GASQRAT | 858 | QHYESSPSVVT | 889 |
| BCMA-30 | RASQSVSSSYLA | 829 | GASSRAT | 856 | QQYGSPPRFT | 890 |
| BCMA-31 | RASQSVSSSYLA | 829 | GASSRAT | 856 | QHYGSSPSVVT | 891 |
| BCMA-32 | RASQRVASNYLA | 830 | GASSRAT | 856 | QHYDSSPSVVT | 892 |
| BCMA-33 | RASQSLSSNFLA | 831 | GASNWAT | 859 | QYYGTSPMYT | 893 |
| BCMA-34 | RSSQSLLHSNGYNYLD | 806 | LGSNRAS | 838 | MQALQTPLT | 894 |
| BCMA-35 | RASQSVSSSYLA | 829 | GTSSRAT | 860 | QHYGNSPPKFT | 895 |
| BCMA-36 | RASQSVASSFLA | 832 | GASGRAT | 861 | QHYGGSPRLT | 896 |
| BCMA-37 | RASQDVNTAVS | 833 | SASYRYT | 862 | QQHYSTPVVT | 897 |
| BCMA-38 | RASESVSVIGAHLIH | 834 | LASNLET | 863 | LQSRIFPRT | 898 |
| BCMA-39 | RASESVTILGSHLIY | 835 | LASNVQT | 864 | LQSRTIPRT | 899 |
| BCMA-40 | RASESVTILGSHLIY | 835 | LASNVQT | 864 | LQSRTIPRT | 899 |

TABLE 16C
BCMA Binders - Light chain CDR sequences according to Chothia
numbering scheme

| | | SEQ ID | | SEQ ID | | SEQ ID |
|---|---|---|---|---|---|---|
| Antibody | CDR-L1 | NO: | CDR-L2 | NO: | CDR-L3 | NO: |
| BCMA-1 | SQSISSY | 900 | AAS | 931 | SYSTPY | 944 |
| BCMA-2 | SQSISSSF | 901 | GAS | 932 | YHSSPSW | 945 |
| BCMA-3 | SQSLLHSNGYNY | 902 | LGS | 933 | ALQTPY | 946 |
| BCMA-4 | SQSLLRNDGKTP | 903 | EVS | 934 | NIQFP | 947 |
| BCMA-5 | SQSLLHSNGYNY | 902 | LGS | 933 | ALQTPY | 946 |
| BCMA-6 | SQSISSY | 900 | GAS | 932 | SYKRA | 948 |
| BCMA-7 | SQSLLYSNGYNY | 904 | LGS | 933 | GRQFPY | 949 |
| BCMA-8 | SQSVSSN | 905 | GAS | 932 | YGSSL | 950 |
| BCMA-9 | SQSVSSK | 906 | GAS | 932 | YGSSSW | 951 |
| BCMA-10 | SQSVGSTN | 907 | DAS | 686 | YGSSPPW | 952 |
| BCMA-11 | SQSISSY | 900 | AAS | 931 | SYTL | 953 |
| BCMA-12 | SESLVHNSGKTY | 908 | EVS | 934 | GTHVVPG | 954 |
| BCMA-13 | SEDINKF | 909 | DAS | 686 | YESLPL | 955 |
| BCMA-14 | SQSVGSN | 910 | GAS | 932 | YNDVVLPV | 956 |
| BCMA-15 | SQSIGSSS | 911 | GAS | 932 | YAGSPPF | 957 |
| BCMA-16 | SQDIDDA | 912 | SAT | 935 | HDNFPL | 958 |
| BCMA-17 | SQDIYNN | 913 | AAN | 936 | YYRFPY | 959 |
| BCMA-18 | SQSLLHSNGYNY | 902 | LGS | 933 | ALQTPY | 946 |
| BCMA-19 | NNIGTKS | 914 | DDS | 937 | VVDSDSEHV | 960 |
| BCMA-20 | DGLSKKY | 915 | RDK | 938 | VVDDTTV | 961 |
| BCMA-21 | SQGIRNW | 916 | AAS | 931 | YNSAPF | 962 |
| BCMA-22 | NNIGSKS | 917 | GKN | 939 | RDSSGDHLR | 963 |
| BCMA-23 | DSLGNYY | 918 | GTN | 685 | RDSSGHHL | 964 |
| BCMA-24 | SQSVSSAY | 919 | GAS | 932 | YGSSFNGSSLF | 965 |
| BCMA-25 | SQSVSNS | 920 | DAS | 686 | FGTSSGL | 966 |
| BCMA-26 | SQSVSSSF | 921 | GAS | 932 | YHSSPSW | 945 |
| BCMA-27 | SQSVSTTF | 922 | GSS | 940 | YHSSPSW | 945 |
| BCMA-28 | SQSISSY | 900 | AAS | 931 | SYSTPY | 944 |
| BCMA-29 | TQSIGSSF | 923 | GAS | 932 | YESSPSW | 967 |
| BCMA-30 | SQSVSSSY | 924 | GAS | 932 | YGSPPRF | 968 |
| BCMA-31 | SQSVSSSY | 924 | GAS | 932 | YGSSPSW | 969 |
| BCMA-32 | SQRVASNY | 925 | GAS | 932 | YDSSPSW | 970 |
| BCMA-33 | SQSLSSNF | 926 | GAS | 932 | YGTSPMY | 971 |
| BCMA-34 | SQSLLHSNGYNY | 902 | LGS | 933 | ALQTPL | 972 |
| BCMA-35 | SQSVSSSY | 924 | GTS | 941 | YGNSPPKF | 973 |
| BCMA-36 | SQSVASSF | 927 | GAS | 932 | YGGSPRL | 974 |
| BCMA-37 | SQDVNTA | 928 | SAS | 942 | HYSTPW | 975 |
| BCMA-38 | SESVSVIGAHL | 929 | LAS | 943 | SRIFPR | 976 |
| BCMA-39 | SESVTILGSHL | 930 | LAS | 943 | SRTIPR | 977 |
| BCMA-40 | SESVTILGSHL | 930 | LAS | 943 | SRTIPR | 977 |

TABLE 16D
BCMA Binders - Light chain CDR sequences according to combination of
Kabat and Chothia numbering schemes

| | | SEQ ID | | SEQ ID | | SEQ ID |
|---|---|---|---|---|---|---|
| Antibody | CDR-L1 | NO: | CDR-L2 | NO: | CDR-L3 | NO: |
| BCMA-1 | RASQSISSYLN | 804 | AASSLQS | 836 | QQSYSTPYT | 865 |
| BCMA-2 | RASQSISSSFLA | 805 | GASRRAT | 837 | QQYHSSPSVVT | 866 |
| BCMA-3 | RSSQSLLHSNGYN | 806 | LGSNRAS | 838 | MQALQTPYT | 867 |
| | YLD | | | | | |
| BCMA-4 | KSSQSLLRNDGKTP | 807 | EVSNRFS | 839 | MQNIQFPS | 868 |
| | LY | | | | | |
| BCMA-5 | RSSQSLLHSNGYN | 808 | LGSKRAS | 840 | MQALQTPYT | 867 |
| | YLN | | | | | |
| BCMA-6 | RASQSISSYLN | 804 | GASTLAS | 841 | QQSYKRAS | 869 |
| BCMA-7 | RSSQSLLYSNGYN | 809 | LGSNRAS | 838 | MQGRQFPYS | 870 |
| | YVD | | | | | |
| BCMA-8 | RASQSVSSNLA | 810 | GASTRAS | 842 | QQYGSSLT | 871 |
| BCMA-9 | RASQSVSSKLA | 811 | GASIRAT | 843 | QQYGSSSVVT | 872 |
| BCMA-10 | RASQSVGSTNLA | 812 | DASNRAT | 684 | QQYGSSPPVVT | 873 |
| BCMA-11 | RASQSISSYLN | 804 | AASSLQS | 836 | QQSYTLA | 874 |
| BCMA-12 | KSSESLVHNSGKTY | 813 | EVSNRDS | 844 | MQGTHVVPGT | 875 |
| | LN | | | | | |
| BCMA-13 | QASEDINKFLN | 814 | DASTLQT | 845 | QQYESLPLT | 876 |
| BCMA-14 | RASQSVGSNLA | 815 | GASTRAT | 846 | QQYNDVVLPVT | 877 |
| BCMA-15 | RASQSIGSSSLA | 816 | GASSRAS | 847 | QQYAGSPPFT | 878 |
| BCMA-16 | KASQDIDDAMN | 817 | SATSPVP | 848 | LQHDNFPLT | 879 |
| BCMA-17 | RASQDIYNNLA | 818 | AANKSQS | 849 | QHYYRFPYS | 880 |
| BCMA-18 | RSSQSLLHSNGYN | 806 | LGSNRAS | 838 | MQALQTPYT | 867 |
| | YLD | | | | | |
| BCMA-19 | GGNNIGTKSVH | 819 | DDSVRPS | 850 | QVVVDSDSEHVV | 881 |
| BCMA-20 | SGDGLSKKYVS | 820 | RDKERPS | 851 | QAVVDDTTVV | 882 |
| BCMA-21 | RASQGIRNWLA | 821 | AASNLQS | 852 | QKYNSAPFT | 883 |
| BCMA-22 | GGNNIGSKSVH | 822 | GKNNRPS | 853 | SSRDSSGDHLRV | 884 |
| BCMA-23 | QGDSLGNYYAT | 823 | GTNNRPS | 854 | NSRDSSGHHLL | 885 |
| BCMA-24 | RASQSVSSAYLA | 824 | GASTRAT | 846 | QHYGSSFNGSSLFT | 886 |
| BCMA-25 | RASQSVSNSLA | 825 | DASSRAT | 855 | QQFGTSSGLT | 887 |
| BCMA-26 | RASQSVSSSFLA | 826 | GASSRAT | 856 | QQYHSSPSVVT | 866 |
| BCMA-27 | RASQSVSTTFLA | 827 | GSSNRAT | 857 | QQYHSSPSVVT | 866 |
| BCMA-28 | RASQSISSYLN | 804 | AASSLQS | 836 | QQSYSTPYS | 888 |
| BCMA-29 | RATQSIGSSFLA | 828 | GASQRAT | 858 | QHYESSPSVVT | 889 |
| BCMA-30 | RASQSVSSSYLA | 829 | GASSRAT | 856 | QQYGSPPRFT | 890 |
| BCMA-31 | RASQSVSSSYLA | 829 | GASSRAT | 856 | QHYGSSPSVVT | 891 |
| BCMA-32 | RASQRVASNYLA | 830 | GASSRAT | 856 | QHYDSSPSVVT | 892 |
| BCMA-33 | RASQSLSSNFLA | 831 | GASNWAT | 859 | QYYGTSPMYT | 893 |
| BCMA-34 | RSSQSLLHSNGYNYLD | 806 | LGSNRAS | 838 | MQALQTPLT | 894 |
| BCMA-35 | RASQSVSSSYLA | 829 | GTSSRAT | 860 | QHYGNSPPKFT | 895 |
| BCMA-36 | RASQSVASSFLA | 832 | GASGRAT | 861 | QHYGGSPRLT | 896 |
| BCMA-37 | RASQDVNTAVS | 833 | SASYRYT | 862 | QQHYSTPVVT | 897 |
| BCMA-38 | RASESVSVIGAHLIH | 834 | LASNLET | 863 | LQSRIFPRT | 898 |
| BCMA-39 | RASESVTILGSHLIY | 835 | LASNVQT | 864 | LQSRTIPRT | 899 |
| BCMA-40 | RASESVTILGSHLIY | 835 | LASNVQT | 864 | LQSRTIPRT | 899 |

TABLE 16E
BCMA Binders - Heavy chain CDR sequences according to Kabat numbering scheme

| | | SEQ ID | | SEQ ID | | SEQ ID |
|---|---|---|---|---|---|---|
| Antibody | CDR-H1 | NO: | CDR-H2 | NO: | CDR-H3 | NO: |
| BCMA-1 | NHGMS | 978 | GIVYSGSTYYAASVKG | 997 | HGGESDV | 1019 |
| BCMA-2 | NYAMS | 979 | GISRSGENTYYADSVKG | 998 | SPAHYYGGMDV | 1020 |
| BCMA-3 | DYAMH | 980 | GISWNSGSIGYADSVKG | 999 | HSFLAY | 1021 |
| BCMA-4 | NHGMS | 978 | GIVYSGSTYYAASVKG | 997 | HGGESDV | 1019 |
| BCMA-5 | NFGIN | 981 | WINPKNNNTNYAQKFQG | 1000 | GPYYYQSYMDV | 1022 |
| BCMA-6 | SDAMT | 982 | VISGSGGTTYYADSVKG | 1001 | LDSSGYYYARGPRY | 1023 |
| BCMA-7 | NYGIT | 983 | WISAYNGNTNYAQKFQG | 1002 | GPYYYYMDV | 1024 |
| BCMA-8 | NHGMS | 978 | GIVYSGSTYYAASVKG | 997 | HGGESDV | 1019 |
| BCMA-9 | NHGMS | 978 | GIVYSGSTYYAASVKG | 997 | HGGESDV | 1019 |
| BCMA-10 | NHGMS | 978 | GIVYSGSTYYAASVKG | 997 | HGGESDV | 1019 |
| BCMA-11 | DYYMS | 984 | YISSSGSTIYYADSVKG | 1003 | ESGDGMDV | 1025 |
| BCMA-12 | DYYMS | 984 | YISSSGNTIYYADSVKG | 1004 | STMVREDY | 1026 |
| BCMA-13 | NHGMS | 978 | GIVYSGSTYYAASVKG | 997 | HGGESDV | 1019 |
| BCMA-14 | NHGMS | 978 | GIVYSGSTYYAASVKG | 997 | HGGESDV | 1019 |
| BCMA-15 | NHGMS | 978 | GIVYSGSTYYAASVKG | 997 | HGGESDV | 1019 |
| BCMA-16 | SSYYYWG | 985 | SIYYSGSAYYNPSLKS | 1005 | HWQEWPDAFDI | 1027 |
| BCMA-17 | TSGMCVS | 986 | RIDWDEDKFYSTSLKT | 1006 | SGAGGTSATAFDI | 1028 |
| BCMA-18 | SYSMN | 987 | SISSSSSYIYYADSVKG | 1007 | TIAAVYAFDI | 1029 |
| BCMA-19 | DYYMS | 984 | YISSSGSTIYYADSVKG | 1003 | DLRGAFDI | 1030 |
| BCMA-20 | SHYIH | 988 | MINPSGGVTAYSQTLQG | 1008 | EGSGSGWYFDF | 1031 |
| BCMA-21 | SGGYYWS | 989 | YIYYSGSTYYNPSLKS | 1009 | AGIAARLRGAFDI | 1032 |
| BCMA 22 | SYAIS | 990 | GIIPIFGTANYAQKFQG | 1010 | RGGYQLLRWDVGLL | 1033 |
| | | | | | RSAFDI | |
| BCMA-23 | SNSAAWN | 991 | RTYYRSKWYSFYAISLK | 1011 | SSPEGLFLYWFDP | 1034 |
| | | | S | | | |
| BCMA-24 | SYAMS | 992 | AISGSGGSTYYADSVKG | 1012 | VEGSGSLDY | 1035 |
| BCMA-25 | RYPMS | 993 | GISDSGVSTYYADSAKG | 1013 | RAGSEASDI | 1036 |
| BCMA-26 | SYAMS | 992 | AISGSGGSTYYADSVKG | 1012 | ATYKRELRYYYGMD | 1037 |
| | | | | | V | |
| BCMA-27 | SYAMS | 992 | AISGSGGSTYYADSVKG | 1012 | ATYKRELRYYYGMD | 1037 |
| | | | | | V | |
| BCMA-28 | DYAMH | 980 | GISVVNSGSIGYADSVKG | 999 | VGKAVPDV | 1038 |
| BCMA-29 | DYAMH | 980 | SINWKGNSLAYGDSVK | 1014 | HQGVAYYNYAMDV | 1039 |
| | | | G | | | |
| BCMA-30 | SYAMS | 992 | AISGSGGSTYYADSVKG | 1012 | VVRDGMDV | 1040 |
| BCMA-31 | SYAMS | 992 | AISGSGGSTYYADSVKG | 1012 | IPQTGTFDY | 1041 |
| BCMA-32 | SYAMS | 992 | AISGSGGSTYYADSVKG | 1012 | ANYKRELRYYYGMD | 1042 |
| | | | | | V | |
| BCMA-33 | SYAMS | 992 | AISGSGGSTYYADSVKG | 1012 | ALVGATGAFDI | 1043 |
| BCMA-34 | SYAMS | 992 | AISGSGGSTYYADSVKG | 1012 | WFGEGFDP | 1044 |
| BCMA-35 | SYAMS | 992 | AISGSGGSTYYADSVKG | 1012 | VGYDSSGYYRDYYG | 1045 |
| | | | | | MDV | |
| BCMA-36 | SYAMS | 992 | AISGSGGSTYYADSVKG | 1012 | MGWSSGYLGAFDI | 1046 |
| BCMA-37 | NFGMN | 994 | WINTYTGESYFADDFKG | 1015 | GEIYYGYDGGFAY | 1047 |
| BCMA-36 | DYSIN | 995 | WINTETREPAYAYDFRG | 1016 | DYSYAMDY | 1048 |
| BCMA-39 | HYSMN | 996 | RINTESGVPIYADDFKG | 1017 | DYLYSLDF | 1049 |
| BCMA-40 | HYSMN | 996 | RINTETGEPLYADDFKG | 1018 | DYLYSCDY | 1050 |

TABLE 16F
BCMA Binders-Heavy chain CDR sequences according to Chothia numbering
scheme

| | | SEQ ID | | SEQ ID | | SEQ ID |
|---|---|---|---|---|---|---|
| Antibody | CDR-H1 | NO: | CDR-H2 | NO: | CDR-H3 | NO: |
| BCMA-1 | GFALSNH | 1051 | VYSGS | 1071 | HGGESDV | 1019 |
| BCMA-2 | GFTFSNY | 1052 | SRSGEN | 1072 | SPAHYYGGMDV | 1020 |
| BCMA-3 | GFTFDDY | 1053 | SWNSGS | 1073 | HSFLAY | 1021 |
| BCMA-4 | GFALSNH | 1051 | VYSGS | 1071 | HGGESDV | 1019 |
| BCMA-5 | GYIFDNF | 1054 | NPKNNN | 1074 | GPYYYQSYMDV | 1022 |
| BCMA-6 | GFTFSSD | 1055 | SGSGGT | 1075 | LDSSGYYYARGPRY | 1023 |
| BCMA-7 | GYTFSNY | 1056 | SAYNGN | 1076 | GPYYYYMDV | 1024 |
| BCMA-8 | GFALSNH | 1051 | VYSGS | 1071 | HGGESDV | 1019 |
| BCMA-9 | GFALSNH | 1051 | VYSGS | 1071 | HGGESDV | 1019 |
| BCMA-10 | GFALSNH | 1051 | VYSGS | 1071 | HGGESDV | 1019 |
| BCMA-11 | GFTFSDY | 1057 | SSSGST | 1077 | ESGDGMDV | 1025 |
| BCMA-12 | GFTFSDY | 1057 | SSSGNT | 1078 | STMVREDY | 1026 |
| BCMA-13 | GFALSNH | 1051 | VYSGS | 1071 | HGGESDV | 1019 |
| BCMA-14 | GFALSNH | 1051 | VYSGS | 1071 | HGGESDV | 1019 |
| BCMA-15 | GFALSNH | 1051 | VYSGS | 1071 | HGGESDV | 1019 |
| BCMA-16 | GGSISSSY | 1058 | YYSGS | 1079 | HWQEVVPDAFDI | 1027 |
| | Y | | | | | |
| BCMA-17 | GFSLRTSG | 1059 | DWDED | 1080 | SGAGGTSATAFDI | 1028 |
| | M | | | | | |
| BCMA-18 | GFTFSSY | 1060 | SSSSSY | 1081 | TIAAVYAFDI | 1029 |
| BCMA-19 | GFTFSDY | 1057 | SSSGST | 1077 | DLRGAFDI | 1030 |
| BCMA-20 | GYTVTSH | 1061 | NPSGGV | 1082 | EGSGSGWYFDF | 1031 |
| BCMA-21 | GGSISSGG | 1062 | YYSGS | 1079 | AGIAARLRGAFDI | 1032 |
| | Y | | | | | |
| BCMA-22 | GGTFSSY | 1063 | IPIFGT | 1083 | RGGYQLLRWDVGLLRSAF | 1033 |
| | | | | | DI | |
| BCMA 23 | GDSVSSN | 1064 | YYRSKWY | 1084 | SSPEGLFLYWFDP | 1034 |
| | SA | | | | | |
| BCMA-24 | GFTFSSY | 1060 | SGSGGS | 1085 | VEGSGSLDY | 1035 |
| BCMA-25 | GITFSRY | 1065 | SDSGVS | 1086 | RAGSEASDI | 1036 |
| BCMA-26 | GFTFSSY | 1060 | SGSGGS | 1085 | ATYKRELRYYYGMDV | 1037 |
| BCMA-27 | GFTFSSY | 1060 | SGSGGS | 1085 | ATYKRELRYYYGMDV | 1037 |
| BCMA-28 | GFTFDDY | 1053 | SWNSGS | 1073 | VGKAVPDV | 1038 |
| BCMA-29 | GFTFDDY | 1053 | NWKGNS | 1087 | HQGVAYYNYAMDV | 1039 |
| BCMA-30 | GFTFSSY | 1060 | SGSGGS | 1085 | VVRDGMDV | 1040 |
| BCMA-31 | GFTFSSY | 1060 | SGSGGS | 1085 | IPQTGTFDY | 1041 |
| BCMA-32 | GFTFSSY | 1060 | SGSGGS | 1085 | ANYKRELRYYYGMDV | 1042 |
| BCMA-33 | GFSFSSY | 1066 | SGSGGS | 1085 | ALVGATGAFDI | 1043 |
| BCMA-34 | GFTFSSY | 1060 | SGSGGS | 1085 | WFGEGFDP | 1044 |
| BCMA-35 | GFTFSSY | 1060 | SGSGGS | 1085 | VGYDSSGYYRDYYGMDV | 1045 |
| BCMA-36 | GFTFSSY | 1060 | SGSGGS | 1085 | MGWSSGYLGAFDI | 1046 |
| BCMA-37 | GYTFTNF | 1067 | NTYTGE | 1088 | GEIYYGYDGGFAY | 1047 |
| BCMA-38 | GYTFTDY | 1068 | NTETRE | 1089 | DYSYAMDY | 1048 |
| BCMA-39 | GYTFRHY | 1069 | NTESGV | 1090 | DYLYSLDF | 1049 |
| BCMA-40 | GYTFTHY | 1070 | NTETGE | 1091 | DYLYSCDY | 1050 |

TABLE 16G
BCMA Binders - Heavy chain CDR sequences according to combination of Kabat
and Chothia numbering schemes

| | | SEQ ID | | SEQ ID | | SEQ ID |
|---|---|---|---|---|---|---|
| Antibody | CDR-H1 | NO: | CDR-H2 | NO: | CDR-H3 | NO: |
| BCMA-1 | GFALSNHGM | 1092 | GIVYSGSTYYAASV | 997 | HGGESDV | 1019 |
| | S | | KG | | | |
| BCMA-2 | GFTFSNYAM | 1093 | GISRSGENTYYADS | 998 | SPAHYYGGMDV | 1020 |
| | S | | VKG | | | |
| BCMA-3 | GFTFDDYAM | 1094 | GISWNSGSIGYADS | 999 | HSFLAY | 1021 |
| | H | | VKG | | | |
| BCMA-4 | GFALSNHGM | 1092 | GIVYSGSTYYAASV | 997 | HGGESDV | 1019 |
| | S | | KG | | | |
| BCMA-5 | GYIFDNFGIN | 1095 | WINPKNNNTNYAQK | 1000 | GPYYYQSYMDV | 1022 |
| | | | FQG | | | |
| BCMA-6 | GFTFSSDAM | 1096 | VISGSGGTTYYADS | 1001 | LDSSGYYYARGPRY | 1023 |
| | T | | VKG | | | |
| BCMA-7 | GYTFSNYGI | 1097 | WISAYNGNTNYAQK | 1002 | GPYYYYMDV | 1024 |
| | T | | FQG | | | |
| BCMA-8 | GFALSNHGM | 1092 | GIVYSGSTYYAASV | 997 | HGGESDV | 1019 |
| | S | | KG | | | |
| BCMA-9 | GFALSNHGM | 1092 | GIVYSGSTYYAASV | 997 | HGGESDV | 1019 |
| | S | | KG | | | |
| BCMA-10 | GFALSNHGM | 1092 | GIVYSGSTYYAASV | 997 | HGGESDV | 1019 |
| | S | | KG | | | |
| BCMA-11 | GFTFSDYYM | 1098 | YISSSGSTIYYADSV | 1003 | ESGDGMDV | 1025 |
| | S | | KG | | | |
| BCMA-12 | GFTFSDYYM | 1098 | YISSSGNTIYYADSV | 1004 | STMVREDY | 1026 |
| | S | | KG | | | |
| BCMA-13 | GFALSNHGM | 1092 | GIVYSGSTYYAASV | 997 | HGGESDV | 1019 |
| | S | | KG | | | |
| BCMA-14 | GFALSNHGM | 1092 | GIVYSGSTYYAASV | 997 | HGGESDV | 1019 |
| | S | | KG | | | |
| BCMA-15 | GFALSNHGM | 1092 | GIVYSGSTYYAASV | 997 | HGGESDV | 1019 |
| | S | | KG | | | |
| BCMA-16 | GGSISSSYY | 1099 | SIYYSGSAYYNPSL | 1005 | HWQEWPDAFDI | 1027 |
| | YWG | | KS | | | |
| BCMA-17 | GFSLRTSGM | 1100 | RIDWDEDKFYSTSL | 1006 | SGAGGTSATAFDI | 1028 |
| | CVS | | KT | | | |
| BCMA-18 | GFTFSSYSM | 1101 | SISSSSSYIYYADSV | 1007 | TIAAVYAFDI | 1029 |
| | N | | KG | | | |
| BCMA-19 | GFTFSDYYM | 1098 | YISSSGSTIYYADSV | 1003 | DLRGAFDI | 1030 |
| | S | | KG | | | |
| BCMA-20 | GYTVTSHYI | 1102 | MINPSGGVTAYSQT | 1008 | EGSGSGWYFDF | 1031 |
| | H | | LQG | | | |
| BCMA-21 | GGSISSGGY | 1103 | YIYYSGSTYYNPSL | 1009 | AGIAARLRGAFDI | 1032 |
| | YWS | | KS | | | |
| BCMA-22 | GGTFSSYAI | 1104 | GIIPIFGTANYAQKF | 1010 | RGGYQLLRWDVGLL | 1033 |
| | S | | QG | | RSAFDI | |
| BCMA-23 | GDSVSSNSA | 1105 | RTYYRSKWYSFYAI | 1011 | SSPEGLFLYWFDP | 1034 |
| | AWN | | SLKS | | | |
| BCMA-24 | GFTFSSYAM | 1106 | AISGSGGSTYYADS | 1012 | VEGSGSLDY | 1035 |
| | S | | VKG | | | |
| BCMA-25 | GITFSRYPM | 1107 | GISDSGVSTYYADS | 1013 | RAGSEASDI | 1036 |
| | S | | AKG | | | |
| BCMA-26 | GFTFSSYAM | 1106 | AISGSGGSTYYADS | 1012 | ATYKRELRYYYGMD | 1037 |
| | S | | VKG | | V | |
| BCMA-27 | GFTFSSYAM | 1106 | AISGSGGSTYYADS | 1012 | ATYKRELRYYYGMD | 1037 |
| | S | | VKG | | V | |
| BCMA-28 | GFTFDDYAM | 1094 | GISWNSGSIGYADS | 999 | VGKAVPDV | 1038 |
| | H | | VKG | | | |
| BCMA-29 | GFTFDDYAM | 1094 | SINWKGNSLAYGDS | 1014 | HQGVAYYNYAMDV | 1039 |
| | H | | VKG | | | |
| BCMA-30 | GFTFSSYAM | 1106 | AISGSGGSTYYADS | 1012 | VVRDGMDV | 1040 |
| | S | | VKG | | | |
| BCMA-31 | GFTFSSYAM | 1106 | AISGSGGSTYYADS | 1012 | IPQTGTFDY | 1041 |
| | S | | VKG | | | |
| BCMA-32 | GFTFSSYAM | 1106 | AISGSGGSTYYADS | 1012 | ANYKRELRYYYGMD | 1042 |
| | S | | VKG | | V | |
| BCMA-33 | GFSFSSYAM | 1108 | AISGSGGSTYYADS | 1012 | ALVGATGAFDI | 1043 |
| | S | | VKG | | | |
| BCMA-34 | GFTFSSYAM | 1106 | AISGSGGSTYYADS | 1012 | WFGEGFDP | 1044 |
| | S | | VKG | | | |
| BCMA-35 | GFTFSSYAM | 1106 | AISGSGGSTYYADS | 1012 | VGYDSSGYYRDYYG | 1045 |
| | S | | VKG | | MDV | |
| BCMA-36 | GFTFSSYAM | 1106 | AISGSGGSTYYADS | 1012 | MGWSSGYLGAFDI | 1046 |
| | S | | VKG | | | |
| BCMA-37 | GYTFTNFGM | 1109 | WINTYTGESYFADD | 1015 | GEIYYGYDGGFAY | 1047 |
| | N | | FKG | | | |
| BCMA-38 | GYTFTDYSIN | 1110 | WINTETREPAYAYD | 1016 | DYSYAMDY | 1048 |
| | | | FRG | | | |
| BCMA-39 | GYTFRHYSM | 1111 | RINTESGVPIYADDF | 1017 | DYLYSLDF | 1049 |
| | N | | KG | | | |
| BCMA-40 | GYTFTHYSM | 1112 | RINTETGEPLYADD | 1018 | DYLYSCDY | 1050 |
| | N | | FKG | | | |

[0560] In some embodiments, a BCMA ABM comprises the CDR sequences of any one of BCMA-1 to BCMA-40. In some embodiments, the ABM comprises the CDR sequences of BCMA-1. In some embodiments, the ABM comprises the CDR sequences of BCMA-2. In some embodiments, the ABM comprises the CDR sequences of BCMA-3. In some embodiments, the ABM comprises the CDR sequences of BCMA-4. In some embodiments, the ABM comprises the CDR sequences of BCMA-5. In some embodiments, the ABM comprises the CDR sequences of BCMA-6. In some embodiments, the ABM comprises the CDR sequences of BCMA-7. In some embodiments, the ABM comprises the CDR sequences of BCMA-8. In some embodiments, the ABM comprises the CDR sequences of BCMA-9. In some embodiments, the ABM comprises the CDR sequences of BCMA-10. In some embodiments, the ABM comprises the CDR sequences of BCMA-11. In some embodiments, the ABM comprises the CDR sequences of BCMA-12. In some embodiments, the ABM comprises the CDR sequences of BCMA-13. In some embodiments, the ABM comprises the CDR sequences of BCMA-14. In some embodiments, the ABM comprises the CDR sequences of BCMA-15. In some embodiments, the ABM comprises the CDR sequences of BCMA-16. In some embodiments, the ABM comprises the CDR sequences of BCMA-17. In some embodiments, the ABM comprises the CDR sequences of BCMA-18. In some embodiments, the ABM comprises the CDR sequences of BCMA-19. In some embodiments, the ABM comprises the CDR sequences of BCMA-20. In some embodiments, the ABM comprises the CDR sequences of BCMA-21. In some embodiments, the ABM comprises the CDR sequences of BCMA-22. In some embodiments, the ABM comprises the CDR sequences of BCMA-23. In some embodiments, the ABM comprises the CDR sequences of BCMA-24. In some embodiments, the ABM comprises the CDR sequences of BCMA-25. In some embodiments, the ABM comprises the CDR sequences of BCMA-26. In some embodiments, the ABM comprises the CDR sequences of BCMA-27. In some embodiments, the ABM comprises the CDR sequences of BCMA-28. In some embodiments, the ABM comprises the CDR sequences of BCMA-29. In some embodiments, the ABM comprises the CDR sequences of BCMA-30. In some embodiments, the ABM comprises the CDR sequences of BCMA-31. In some embodiments, the ABM comprises the CDR sequences of BCMA-32. In some embodiments, the ABM comprises the CDR sequences of BCMA-33. In some embodiments, the ABM comprises the CDR sequences of BCMA-34. In some embodiments, the ABM comprises the CDR sequences of BCMA-35. In some embodiments, the ABM comprises the CDR sequences of BCMA-36. In some embodiments, the ABM comprises the CDR sequences of BCMA-37. In some embodiments, the ABM comprises the CDR sequences of BCMA-38. In some embodiments, the ABM comprises the CDR sequences of BCMA-39. In some embodiments, the ABM comprises the CDR sequences of BCMA-40.

[0561] In some embodiments, the CDRs are defined by Kabat numbering, as set forth in Tables 16B and 16E. In other embodiments, the CDRs are defined by Chothia numbering, as set forth in Tables 16C and 16F. In yet other embodiments, the CDRs are defined by a combination of Kabat and Chothia numbering, as set forth in Tables 16D and 16G.

[0562] In some embodiments, a MBM (e.g., TBM) comprising a BCMA ABM can comprise the heavy and light chain variable sequences of any of BCMA-1 to BCMA-40, as set forth in Table 16A.

[0563] In some embodiments, the ABM comprises the heavy and light chain variable sequences of BCMA-1. In some embodiments, the ABM comprises the heavy and light chain variable sequences of BCMA-2. In some embodiments, the ABM comprises the heavy and light chain variable sequences of BCMA-3. In some embodiments, the ABM comprises the heavy and light chain variable sequences of BCMA-4. In some embodiments, the ABM comprises the heavy and light chain variable sequences of BCMA-5. In some embodiments, the ABM comprises the heavy and light chain variable sequences of BCMA-6. In some embodiments, the ABM comprises the heavy and light chain variable sequences of BCMA-7. In some embodiments, the ABM comprises the heavy and light chain variable sequences of BCMA-8. In some embodiments, the ABM comprises the heavy and light chain variable sequences of BCMA-9. In some embodiments, the ABM comprises the heavy and light chain variable sequences of BCMA-10. In some embodiments, the ABM comprises the heavy and light chain variable sequences of BCMA-11. In some embodiments, the ABM comprises the heavy and light chain variable sequences of BCMA-12. In some embodiments, the ABM comprises the heavy and light chain variable sequences of BCMA-13. In some embodiments, the ABM comprises the heavy and light chain variable sequences of BCMA-14. In some embodiments, the ABM comprises the heavy and light chain variable sequences of BCMA-15. In some embodiments, the ABM comprises the heavy and light chain variable sequences of BCMA-16. In some embodiments, the ABM comprises the heavy and light chain variable sequences of BCMA-17. In some embodiments, the ABM comprises the heavy and light chain variable sequences of BCMA-18. In some embodiments, the ABM comprises the heavy and light chain variable sequences of BCMA-19. In some embodiments, the ABM comprises the heavy and light chain variable sequences of BCMA-20. In some embodiments, the ABM comprises the heavy and light chain variable sequences of BCMA-21. In some embodiments, the ABM comprises the heavy and light chain variable sequences of BCMA-22.

[0564] In some embodiments, the ABM comprises the heavy and light chain variable sequences of BCMA-23. In some embodiments, the ABM comprises the heavy and light chain variable sequences of BCMA-24. In some embodiments, the ABM comprises the heavy and light chain variable sequences of BCMA-25. In some embodiments, the ABM comprises the heavy and light chain variable sequences of BCMA-26. In some embodiments, the ABM comprises the heavy and light chain variable sequences of BCMA-27. In some embodiments, the ABM comprises the heavy and light chain variable sequences of BCMA-28. In some embodiments, the ABM comprises the heavy and light chain variable sequences of BCMA-29. In some embodiments, the ABM comprises the heavy and light chain variable sequences of BCMA-30. In some embodiments, the ABM comprises the heavy and light chain variable sequences of BCMA-31. In some embodiments, the ABM comprises the heavy and light chain variable sequences of BCMA-32. In some embodiments, the ABM comprises the heavy and light chain variable sequences of BCMA-33. In some embodiments, the ABM comprises the heavy and light chain variable sequences of BCMA-34. In some embodiments, the ABM comprises the heavy and light chain variable sequences of BCMA-35. In some embodiments, the ABM comprises the heavy and light chain variable sequences of BCMA-36. In some embodiments, the ABM comprises the heavy and light chain variable sequences of BCMA-37. In some embodiments, the ABM comprises the heavy and light chain variable sequences of BCMA-38. In some embodiments, the ABM comprises the heavy and light chain variable sequences of BCMA-39. In some embodiments, the ABM comprises the heavy and light chain variable sequences of BCMA-40.

[0565] 7.10.2. CD19

[0566] B cells express cell surface proteins which can be utilized as markers for differentiation and identification. One such human B-cell marker is a CD19 antigen and is found on mature B cells but not on plasma cells. CD19 is expressed during early pre-B cell development and remains until plasma cell differentiation. CD19 is expressed on both normal B cells and malignant B cells whose abnormal growth can lead to B-cell lymphomas. For example, CD19 is expressed on B-cell lineage malignancies, including, but not limited to non-Hodgkin's lymphoma (B-NHL), chronic lymphocytic leukemia, and acute lymphoblastic leukemia.

[0567] In certain aspects, a MBM comprises an ABM2 or ABM3 that specifically binds to CD19 (such ABMs are referred to as “CD19 ABMs” for convenience). Exemplary CDR and variable domain sequences that can be incorporated into CD19 ABMs are set forth in Table 17 below.

TABLE 17
CD19 Binders

| | | | SEQ |
|---|---|---|---|
| | | | ID |
| Name | Domain | Sequence | NO: |
| CD19-H1 | CDR-H1 | DYGVS | 104 |
| CD19-H2A | CDR-H2 | VIWGSETTYYNSALKS | 105 |
| CD19-H2B | CDR-H2 | VIWGSETTYYSSSLKS | 106 |
| CD19-H2C | CDR-H2 | VIWGSETTYYQSSLKS | 107 |
| CD19-H2D | CDR-H2 | VIWGSETTYYNSSLKS | 108 |
| CD19-H3 | CDR-H3 | HYYYGGSYAMDY | 109 |
| CD19-L1 | CDR-L1 | RASQDISKYLN | 110 |
| CD19-L2 | CDR-L2 | HTSRLHS | 111 |
| CD19-L3 | CDR-L3 | QQGNTLPYT | 112 |
| CD19-VHA | VH | EVKLQESGPGLVAPSQSLSVTCTVSGVSLPDYGVSWI | 113 |
| | | RQPPRKGLEWLGVIWGSETTYYNSALKSRLTIIKDNSK | |
| | | SQVFLKMNSLQTDDTAIYYCAKHYYYGGSYAMDYWG | |
| | | QGTSVTVSS | |
| CD19-VHB | VH | QVQLQESGPGLVKPSETLSLTCTVSGVSLPDYGVSWIR | 114 |
| | | QPPGKGLEWIGVIWGSETTYYSSSLKSRVTISKDNSKN | |
| | | QVSLKLSSVTAADTAVYYCAKHYYYGGSYAMDYWGQ | |
| | | GTLVTVSS | |
| CD19-VHC | VH | QVQLQESGPGLVKPSETLSLTCTVSGVSLPDYGVSWIR | 115 |
| | | QPPGKGLEWIGVIWGSETTYYQSSLKSRVTISKDNSKN | |
| | | QVSLKLSSVTAADTAVYYCAKHYYYGGSYAMDYWGQ | |
| | | GTLVTVSS | |
| CD19-VHD | VH | QVQLQESGPGLVKPSETLSLTCTVSGVSLPDYGVSWIR | 116 |
| | | QPPGKGLEWIGVIWGSETTYYNSSLKSRVTISKDNSKN | |
| | | QVSLKLSSVTAADTAVYYCAKHYYYGGSYAMDYWGQ | |
| | | GTLVTVSS | |
| CD19-VLA | VL | DIQMTQTTSSLSASLGDRVTISCRASQDISKYLNWYQQ | 117 |
| | | KPDGTVKLLIYHTSRLHSGVPSRFSGSGSGTDYSLTISN | |
| | | LEQEDIATYFCQQGNTLPYTFGGGTKLEIT | |
| CD19-VLB | VL | EIVMTQSPATLSLSPGERATLSCRASQDISKYLNWYQQ | 118 |
| | | KPGQAPRLLIYHTSRLHSGIPARFSGSGSGTDYTLTISS | |
| | | LQPEDFAVYFCQQGNTLPYTFGQGTKLEIK | |
| CD19-scFv1 | scFv | EIVMTQSPATLSLSPGERATLSCRASQDISKYLNWYQQ | 119 |
| | | KPGQAPRLLIYHTSRLHSGIPARFSGSGSGTDYTLTISS | |
| | | LQPEDFAVYFCQQGNTLPYTFGQGTKLEIKGGGGSGG | |
| | | GGSGGGGSQVQLQESGPGLVKPSETLSLTCTVSGVSL | |
| | | PDYGVSWIRQPPGKGLEWIGVIWGSETTYYSSSLKSR | |
| | | VTISKDNSKNQVSLKLSSVTAADTAVYYCAKHYYYGGS | |
| | | YAMDYWGQGTLVTVSS | |
| CD19-scFv2 | scFv | EIVMTQSPATLSLSPGERATLSCRASQDISKYLNWYQQ | 120 |
| | | KPGQAPRLLIYHTSRLHSGIPARFSGSGSGTDYTLTISS | |
| | | LQPEDFAVYFCQQGNTLPYTFGQGTKLEIKGGGGSGG | |
| | | GGSGGGGSQVQLQESGPGLVKPSETLSLTCTVSGVSL | |
| | | PDYGVSWIRQPPGKGLEWIGVIWGSETTYYQSSLKSR | |
| | | VTISKDNSKNQVSLKLSSVTAADTAVYYCAKHYYYGGS | |
| | | YAMDYWGQGTLVTVSS | |
| CD19-scFv3 | scFv | QVQLQESGPGLVKPSETLSLTCTVSGVSLPDYGVSWIR | 121 |
| | | QPPGKGLEWIGVIWGSETTYYSSSLKSRVTISKDNSKN | |
| | | QVSLKLSSVTAADTAVYYCAKHYYYGGSYAMDYWGQ | |
| | | GTLVTVSSGGGGSGGGGSGGGGSEIVMTQSPATLSLS | |
| | | PGERATLSCRASQDISKYLNVVYQQKPGQAPRLLIYHTS | |
| | | RLHSGIPARFSGSGSGTDYTLTISSLQPEDFAVYFCQQ | |
| | | GNTLPYTFGQGTKLEK | |
| CD19-scFv4 | scFv | QVQLQESGPGLVKPSETLSLTCTVSGVSLPDYGVSWIR | 122 |
| | | QPPGKGLEWIGVIWGSETTYYQSSLKSRVTISKDNSKN | |
| | | QVSLKLSSVTAADTAVYYCAKHYYYGGSYAMDYWGQ | |
| | | GTLVTVSSGGGGSGGGGSGGGGSEIVMTQSPATLSLS | |
| | | PGERATLSCRASQDISKYLNVVYQQKPGQAPRLLIYHTS | |
| | | RLHSGIPARFSGSGSGTDYTLTISSLQPEDFAVYFCQQ | |
| | | GNTLPYTFGQGTKLEIK | |
| CD19-scFv5 | scFv | EIVMTQSPATLSLSPGERATLSCRASQDISKYLNWYQQ | 123 |
| | | KPGQAPRLLIYHTSRLHSGIPARFSGSGSGTDYTLTISS | |
| | | LQPEDFAVYFCQQGNTLPYTFGQGTKLEIKGGGGSGG | |
| | | GGSGGGGSGGGGSQVQLQESGPGLVKPSETLSLTCT | |
| | | VSGVSLPDYGVSWIRQPPGKGLEWIGVIWGSETTYYS | |
| | | SSLKSRVTISKDNSKNQVSLKLSSVTAADTAVYYCAKH | |
| | | YYYGGSYAMDYWGQGTLVTVSS | |
| CD19-scFv6 | scFv | EIVMTQSPATLSLSPGERATLSCRASQDISKYLNWYQQ | 124 |
| | | KPGQAPRLLIYHTSRLHSGIPARFSGSGSGTDYTLTISS | |
| | | LQPEDFAVYFCQQGNTLPYTFGQGTKLEIKGGGGSGG | |
| | | GGSGGGGSGGGGSQVQLQESGPGLVKPSETLSLTCT | |
| | | VSGVSLPDYGVSWIRQPPGKGLEWIGVIWGSETTYYQ | |
| | | SSLKSRVTISKDNSKNQVSLKLSSVTAADTAVYYCAKH | |
| | | YYYGGSYAMDYWGQGTLVTVSS | |
| CD19-scFv7 | scFv | QVQLQESGPGLVKPSETLSLTCTVSGVSLPDYGVSWIR | 125 |
| | | QPPGKGLEWIGVIWGSETTYYSSSLKSRVTISKDNSKN | |
| | | QVSLKLSSVTAADTAVYYCAKHYYYGGSYAMDYWGQ | |
| | | GTLVTVSSGGGGSGGGGSGGGGSGGGGSEIVMTQS | |
| | | PATLSLSPGERATLSCRASQDISKYLNVVYQQKPGQAP | |
| | | RLLIYHTSRLHSGIPARFSGSGSGTDYTLTISSLQPEDF | |
| | | AVYFCQQGNTLPYTFGQGTKLEIK | |
| CD19-scFv8 | scFv | QVQLQESGPGLVKPSETLSLTCTVSGVSLPDYGVSWIR | 126 |
| | | QPPGKGLEWIGVIWGSETTYYQSSLKSRVTISKDNSKN | |
| | | QVSLKLSSVTAADTAVYYCAKHYYYGGSYAMDYWGQ | |
| | | GTLVTVSSGGGGSGGGGSGGGGSGGGGSEIVMTQS | |
| | | PATLSLSPGERATLSCRASQDISKYLNVVYQQKPGQAP | |
| | | RLLIYHTSRLHSGIPARFSGSGSGTDYTLTISSLQPEDF | |
| | | AVYFCQQGNTLPYTFGQGTKLEIK | |
| CD19-scFv9 | scFv | EIVMTQSPATLSLSPGERATLSCRASQDISKYLNWYQQ | 127 |
| | | KPGQAPRLLIYHTSRLHSGIPARFSGSGSGTDYTLTISS | |
| | | LQPEDFAVYFCQQGNTLPYTFGQGTKLEIKGGGGSGG | |
| | | GGSGGGGSGGGGSQVQLQESGPGLVKPSETLSLTCT | |
| | | VSGVSLPDYGVSWIRQPPGKGLEWIGVIWGSETTYYN | |
| | | SSLKSRVTISKDNSKNQVSLKLSSVTAADTAVYYCAKH | |
| | | YYYGGSYAMDYWGQGTLVTVSS | |
| CD19-scFv10 | scFv | QVQLQESGPGLVKPSETLSLTCTVSGVSLPDYGVSWIR | 128 |
| | | QPPGKGLEWIGVIWGSETTYYNSSLKSRVTISKDNSKN | |
| | | QVSLKLSSVTAADTAVYYCAKHYYYGGSYAMDYWGQ | |
| | | GTLVTVSSGGGGSGGGGSGGGGSGGGGSEIVMTQS | |
| | | PATLSLSPGERATLSCRASQDISKYLNVVYQQKPGQAP | |
| | | RLLIYHTSRLHSGIPARFSGSGSGTDYTLTISSLQPEDF | |
| | | AVYFCQQGNTLPYTFGQGTKLEIK | |
| CD19-scFv11 | scFv | EIVMTQSPATLSLSPGERATLSCRASQDISKYLNWYQQ | 129 |
| | | KPGQAPRLLIYHTSRLHSGIPARFSGSGSGTDYTLTISS | |
| | | LQPEDFAVYFCQQGNTLPYTFGQGTKLEIKGGGGSGG | |
| | | GGSGGGGSQVQLQESGPGLVKPSETLSLTCTVSGVSL | |
| | | PDYGVSWIRQPPGKGLEWIGVIWGSETTYYNSSLKSR | |
| | | VTISKDNSKNQVSLKLSSVTAADTAVYYCAKHYYYGGS | |
| | | YAMDYWGQGTLVTVSS | |
| CD19-scFv12 | scFv | QVQLQESGPGLVKPSETLSLTCTVSGVSLPDYGVSWIR | 130 |
| | | QPPGKGLEWIGVIWGSETTYYNSSLKSRVTISKDNSKN | |
| | | QVSLKLSSVTAADTAVYYCAKHYYYGGSYAMDYWGQ | |
| | | GTLVTVSSGGGGSGGGGSGGGGSEIVMTQSPATLSLS | |
| | | PGERATLSCRASQDISKYLNVVYQQKPGQAPRLLIYHTS | |
| | | RLHSGIPARFSGSGSGTDYTLTISSLQPEDFAVYFCQQ | |
| | | GNTLPYTFGQGTKLEIK | |

[0568] In certain aspects, a CD19 ABM comprises heavy chain CDRs having the amino acid sequences of CD19-H1, CD19-H2A, and CD19-H3 as set forth in Table 17 and light chain CDRs having the amino acid sequences of CD19-L1, CD19-L2, and CD19-L3 as set forth in Table 17. In a specific embodiment, the ABM comprises a heavy chain variable region having the amino acid sequences of VHA as set forth in Table 17 and a light chain variable region having the amino acid sequences of VLA as set forth in Table 17.

[0569] In other aspects, the ABM comprises heavy chain CDRs having the amino acid sequences of CD19-H1, CD19-H2B, and CD19-H3 as set forth in Table 17 and light chain CDRs having the amino acid sequences of CD19-L1, CD19-L2, and CD19-L3 as set forth in Table 17. In a specific embodiment, the ABM comprises a heavy chain variable region having the amino acid sequences of VHB as set forth in Table 17 and a light chain variable region having the amino acid sequences of VLB as set forth in Table 17.

[0570] In further aspects, the ABM comprises heavy chain CDRs having the amino acid sequences of CD19-H1, CD19-H2C, and CD19-H3 as set forth in Table 17 and light chain CDRs having the amino acid sequences of CD19-L1, CD19-L2, and CD19-L3 as set forth in Table 17. In a specific embodiment, ABM comprises a heavy chain variable region having the amino acid sequences of VHC as set forth in Table 17 and a light chain variable region having the amino acid sequences of VLB as set forth in Table 17.

[0571] In further aspects, the ABM comprises heavy chain CDRs having the amino acid sequences of CD19-H1, CD19-H2D, and CD19-H3 as set forth in Table 17 and light chain CDRs having the amino acid sequences of CD19-L1, CD19-L2, and CD19-L3 as set forth in Table 17. In a specific embodiment, the ABM comprises a heavy chain variable region having the amino acid sequences of VHD as set forth in Table 17 and a light chain variable region having the amino acid sequences of VLB as set forth in Table 17.

[0572] In yet further aspects, the ABM is in the form of an scFV. Exemplary anti-CD19 scFvs comprise the amino acid sequence of any one of CD19-scFv1 through CD19-scFv12 as set forth in Table 17.

### 7.11. Nucleic Acids and Host Cells

[0573] In another aspect, the disclosure provides nucleic acids encoding the CD3 binding molecules (e.g., MBMs) of the disclosure. In some embodiments, the CD3 binding molecules (e.g., MBMs) are encoded by a single nucleic acid. In other embodiments, the CD3 binding molecules (e.g., MBMs) are encoded by a plurality (e.g., two, three, four or more) nucleic acids.

[0574] A single nucleic acid can encode a CD3 binding molecule (e.g., MBM) that comprises a single polypeptide chain, a CD3 binding molecule (e.g., MBM) that comprises two or more polypeptide chains, or a portion of a CD3 binding molecule (e.g., MBM) that comprises more than two polypeptide chains (for example, a single nucleic acid can encode two polypeptide chains of a CD3 binding molecule (e.g., MBM) comprising three, four or more polypeptide chains, or three polypeptide chains of a CD3 binding molecule (e.g., MBM) comprising four or more polypeptide chains). For separate control of expression, the open reading frames encoding two or more polypeptide chains can be under the control of separate transcriptional regulatory elements (e.g., promoters and/or enhancers). The open reading frames encoding two or more polypeptides can also be controlled by the same transcriptional regulatory elements, and separated by internal ribosome entry site (IRES) sequences allowing for translation into separate polypeptides.

[0575] In some embodiments, a CD3 binding molecule (e.g., MBM) comprising two or more polypeptide chains is encoded by two or more nucleic acids. The number of nucleic acids encoding a CD3 binding molecule (e.g., MBM) can be equal to or less than the number of polypeptide chains in the CD3 binding molecule (e.g., MBM) (for example, when more than one polypeptide chains are encoded by a single nucleic acid).

[0576] The nucleic acids can be DNA or RNA (e.g., mRNA).

[0577] In another aspect, the disclosure provides host cells and vectors containing the nucleic acids of the disclosure. The nucleic acids can be present in a single vector or separate vectors present in the same host cell or separate host cell, as described in more detail herein below.

[0578] 7.11.1. Vectors

[0579] The disclosure provides vectors comprising nucleotide sequences encoding a CD3 binding molecule (e.g., MBM) or a CD3 binding molecule (e.g., MBM) component described herein. In one embodiment, the vectors comprise nucleotides encoding an immunoglobulin-based ABM described herein. In one embodiment, the vectors comprise nucleotides encoding an Fc domain described herein. In one embodiment, the vectors comprise nucleotides encoding a recombinant non-immunoglobulin based ABM described herein. A vector can encode one or more ABMs, one or more Fc domains, one or more non-immunoglobulin based ABM, or a combination thereof (e.g., when multiple components or sub-components are encoded as a single polypeptide chain). In one embodiment, the vectors comprise the nucleotide sequences described herein. The vectors include, but are not limited to, a virus, plasmid, cosmid, lambda phage or a yeast artificial chromosome (YAC).

[0580] Numerous vector systems can be employed. For example, one class of vectors utilizes DNA elements which are derived from animal viruses such as, for example, bovine papilloma virus, polyoma virus, adenovirus, vaccinia virus, baculovirus, retroviruses (Rous Sarcoma Virus, MMTV or MOMLV) or SV40 virus. Another class of vectors utilizes RNA elements derived from RNA viruses such as Semliki Forest virus, Eastern Equine Encephalitis virus and Flaviviruses.

[0581] Additionally, cells which have stably integrated the DNA into their chromosomes can be selected by introducing one or more markers which allow for the selection of transfected host cells. The marker can provide, for example, prototropy to an auxotrophic host, biocide resistance (e.g., antibiotics), or resistance to heavy metals such as copper, or the like. The selectable marker gene can be either directly linked to the DNA sequences to be expressed, or introduced into the same cell by cotransformation. Additional elements can also be needed for optimal synthesis of mRNA. These elements can include splice signals, as well as transcriptional promoters, enhancers, and termination signals.

[0582] Once the expression vector or DNA sequence containing the constructs has been prepared for expression, the expression vectors can be transfected or introduced into an appropriate host cell. Various techniques can be employed to achieve this, such as, for example, protoplast fusion, calcium phosphate precipitation, electroporation, retroviral transduction, viral transfection, gene gun, lipid based transfection or other conventional techniques. Methods and conditions for culturing the resulting transfected cells and for recovering the expressed polypeptides are known to those skilled in the art, and can be varied or optimized depending upon the specific expression vector and mammalian host cell employed, based upon the present description.

[0583] 7.11.2. Cells

[0584] The disclosure also provides host cells comprising a nucleic acid of the disclosure.

[0585] In one embodiment, the host cells are genetically engineered to comprise one or more nucleic acids described herein.

[0586] In one embodiment, the host cells are genetically engineered by using an expression cassette. The phrase “expression cassette,” refers to nucleotide sequences, which are capable of affecting expression of a gene in hosts compatible with such sequences. Such cassettes can include a promoter, an open reading frame with or without introns, and a termination signal. Additional factors necessary or helpful in effecting expression can also be used, such as, for example, an inducible promoter.

[0587] The disclosure also provides host cells comprising the vectors described herein.

[0588] The cell can be, but is not limited to, a eukaryotic cell, a bacterial cell, an insect cell, or a human cell. Suitable eukaryotic cells include, but are not limited to, Vero cells, HeLa cells, COS cells, CHO cells, HEK293 cells, BHK cells and MDCKII cells. Suitable insect cells include, but are not limited to, Sf9 cells.

### 7.12. CD3 Binding Molecules with Extended In Vivo Half-Life

[0589] The CD3 binding molecules can be modified to have an extended half-life in vivo.

[0590] A variety of strategies can be used to extend the half life of CD3 binding molecules of the disclosure. For example, by chemical linkage to polyethyleneglycol (PEG), reCODE PEG, antibody scaffold, polysialic acid (PSA), hydroxyethyl starch (HES), albumin-binding ligands, and carbohydrate shields; by genetic fusion to proteins binding to serum proteins, such as albumin, IgG, FcRn, and transferring; by coupling (genetically or chemically) to other binding moieties that bind to serum proteins, such as nanobodies, Fabs, DARPins, avimers, affibodies, and anticalins; by genetic fusion to rPEG, albumin, domain of albumin, albumin-binding proteins, and Fc; or by incorporation into nanocarriers, slow release formulations, or medical devices.

[0591] To prolong the serum circulation of CD3 binding molecules in vivo, inert polymer molecules such as high molecular weight PEG can be attached to the CD3 binding molecules with or without a multifunctional linker either through site-specific conjugation of the PEG to the N- or C-terminus of a polypeptide comprising the CD3 binding molecule or via epsilon-amino groups present on lysine residues. To pegylate a CD3 binding molecule, the molecule can be reacted with polyethylene glycol (PEG), such as a reactive ester or aldehyde derivative of PEG, under conditions in which one or more PEG groups become attached to the CD3 binding molecules. The pegylation can be carried out by an acylation reaction or an alkylation reaction with a reactive PEG molecule (or an analogous reactive water-soluble polymer). As used herein, the term “polyethylene glycol” is intended to encompass any one of the forms of PEG that have been used to derivatize other proteins, such as mono (C1-C10)alkoxy- or aryloxy-polyethylene glycol or polyethylene glycol-maleimide. In one embodiment, the CD3 binding molecule to be pegylated is an aglycosylated antibody. Linear or branched polymer derivatization that results in minimal loss of biological activity will be used. The degree of conjugation can be closely monitored by SDS-PAGE and mass spectrometry to ensure proper conjugation of PEG molecules to the antibodies. Unreacted PEG can be separated from antibody-PEG conjugates by size-exclusion or by ion-exchange chromatography. PEG-derivatized antibodies can be tested for binding activity as well as for in vivo efficacy using methods well-known to those of skill in the art, for example, by immunoassays described herein. Methods for pegylating proteins are known and can be applied to CD3 binding molecules of the disclosure. See for example, EP 0154316 by Nishimura et al. and EP 0401384 by Ishikawa et al.

[0592] Other modified pegylation technologies include reconstituting chemically orthogonal directed engineering technology (ReCODE PEG), which incorporates chemically specified side chains into biosynthetic proteins via a reconstituted system that includes tRNA synthetase and tRNA. This technology enables incorporation of more than 30 new amino acids into biosynthetic proteins in E. coli, yeast, and mammalian cells. The tRNA incorporates a normative amino acid any place an amber codon is positioned, converting the amber from a stop codon to one that signals incorporation of the chemically specified amino acid.

[0593] Recombinant pegylation technology (rPEG) can also be used for serum half life extension. This technology involves genetically fusing a 300-600 amino acid unstructured protein tail to an existing pharmaceutical protein. Because the apparent molecular weight of such an unstructured protein chain is about 15-fold larger than its actual molecular weight, the serum half life of the protein is greatly increased. In contrast to traditional PEGylation, which requires chemical conjugation and repurification, the manufacturing process is greatly simplified and the product is homogeneous.

[0594] Polysialytion is another technology, which uses the natural polymer polysialic acid (PSA) to prolong the active life and improve the stability of therapeutic peptides and proteins. PSA is a polymer of sialic acid (a sugar). When used for protein and therapeutic peptide drug delivery, polysialic acid provides a protective microenvironment on conjugation. This increases the active life of the therapeutic protein in the circulation and prevents it from being recognized by the immune system. The PSA polymer is naturally found in the human body. It was adopted by certain bacteria which evolved over millions of years to coat their walls with it. These naturally polysialylated bacteria were then able, by virtue of molecular mimicry, to foil the body's defense system. PSA, nature's ultimate stealth technology, can be easily produced from such bacteria in large quantities and with predetermined physical characteristics. Bacterial PSA is completely non-immunogenic, even when coupled to proteins, as it is chemically identical to PSA in the human body.

[0595] Another technology include the use of hydroxyethyl starch (“HES”) derivatives linked to CD3 binding molecules. HES is a modified natural polymer derived from waxy maize starch and can be metabolized by the body's enzymes. HES solutions are usually administered to substitute deficient blood volume and to improve the rheological properties of the blood. Hesylation of a CD3 binding molecule enables the prolongation of the circulation half-life by increasing the stability of the molecule, as well as by reducing renal clearance, resulting in an increased biological activity. By varying different parameters, such as the molecular weight of HES, a wide range of HES CD3 binding molecule conjugates can be customized.

[0596] CD3 binding molecules having an increased half-life in vivo can also be generated introducing one or more amino acid modifications (i.e., substitutions, insertions or deletions) into an IgG constant domain, or FcRn binding fragment thereof (e.g., an Fc or hinge Fc domain fragment). See, e.g., International Publication No. WO 98/23289; International Publication No. WO 97/34631; and U.S. Pat. No. 6,277,375.

[0597] Furthermore, the CD3 binding molecules can be conjugated to albumin, a domain of albumin, an albumin-binding protein, or an albumin-binding antibody or antibody fragments thereof, in order to make the molecules more stable in vivo or have a longer half life in vivo. The techniques are well-known, see, e.g., International Publication Nos. WO 93/15199, WO 93/15200, and WO 01/77137; and European Patent No. EP 413,622.

[0598] The CD3 binding molecules of the present disclosure can also be fused to one or more human serum albumin (HSA) polypeptides, or a portion thereof. The use of albumin as a component of an albumin fusion protein as a carrier for various proteins has been suggested in WO 93/15199, WO 93/15200, and EP 413 622. The use of N-terminal fragments of HSA for fusions to polypeptides has also been proposed (EP 399 666). Accordingly, by genetically or chemically fusing or conjugating the molecules to albumin, can stabilize or extend the shelf-life, and/or to retain the molecule's activity for extended periods of time in solution, in vitro and/or in vivo. Additional methods pertaining to HSA fusions can be found, for example, in WO 2001077137 and WO 200306007. In an embodiment, the expression of the fusion protein is performed in mammalian cell lines, for example, CHO cell lines.

[0599] The CD3 binding molecules of the present disclosure can also be fused to an antibody or antibody fragment thereof that binds to albumin, e.g., human serum albumin (HSA). The albumin-binding antibody or antibody fragment thereof can be a Fab, a scFv, a Fv, an scFab, a (Fab′)2, a single domain antibody, a camelid VHH domain, a VH or VL domain, or a full-length monoclonal antibody (mAb).

[0600] The CD3 binding molecules of the present disclosure can also be fused to a fatty acid to extend their half-life. Fatty acids suitable for linking to a biomolecule have been described in the art, e.g., WO2015/200078, WO2015/191781, US2013/0040884. Suitable half-life extending fatty acids include those defined as a C6-70alkyl, a C6-70alkenyl or a C6-70alkynyl chain, each of which is substituted with at least one carboxylic acid (for example 1, 2, 3 or 4 CO2H) and optionally further substituted with hydroxyl group. For example, the CD3 binding molecules described herein can be linked to a fatty acid having any of the following Formulae A1, A2 or A3:

[chemical structure]

R¹ is CO₂H or H;
R², R³ and R⁴ are independently of each other H, OH, CO₂H, —CH═CH₂ or —C≡CH;
Ak is a branched C₆-C₃₀alkylene;
n, m and p are independently of each other an integer between 6 and 30; or an amide, ester or pharmaceutically acceptable salt thereof.

[0601] In some embodiments, the fatty acid is of Formula A1, e.g., a fatty acid of Formula A1 where n and m are independently 8 to 20, e.g., 10 to 16. In another embodiment, the fatty acid moiety is of Formula A1 and where at least one of R² and R³ is CO₂H.

[0602] In some embodiments, the fatty acid is selected from the following Formulae:

[chemical structure]

where Ak³, Ak⁴, Ak⁵, Ak⁶ and Ak⁷ are independently a (C₈₋₂₀)alkylene, R⁵ and R⁶ are independently (C₈₋₂₀)alkyl.

[0603] In some embodiments, the fatty acid is selected from the following Formulae:

[chemical structure]

[chemical structure]

[0604] In some embodiments, the fatty acid is selected from the following Formulae:

[chemical structure]

[chemical structure]

[0605] In some embodiments, the fatty acid is of Formula A2 or A3. In a particular embodiment, the conjugate comprises a fatty acid moiety of Formula A2 where p is 8 to 20, or a fatty acid moiety of Formula A3 where Ak is C₈₋₂₀alkylene.

### 7.13. Antibody-Drug Conjugates

[0606] The CD3 binding molecules (e.g., MBMs) can be conjugated, e.g., via a linker, to a drug moiety. Such conjugates are referred to herein as antibody-drug conjugates (or “ADCs”) for convenience, notwithstanding the fact that one or more (or all) of the ABMs might be based on non-immunoglobulin scaffolds.

[0607] In certain aspects, the drug moiety exerts a cytotoxic or cytostatic activity. In one embodiment, the drug moiety is chosen from a maytansinoid, a kinesin-like protein KIF11 inhibitor, a V-ATPase (vacuolar-type H+-ATPase) inhibitor, a pro-apoptotic agent, a Bcl2 (B-cell lymphoma 2) inhibitor, an MCL1 (myeloid cell leukemia 1) inhibitor, a HSP90 (heat shock protein 90) inhibitor, an IAP (inhibitor of apoptosis) inhibitor, an mTOR (mechanistic target of rapamycin) inhibitor, a microtubule stabilizer, a microtubule destabilizer, an auristatin, a dolastatin, a MetAP (methionine aminopeptidase), a CRM1 (chromosomal maintenance 1) inhibitor, a DPPIV (dipeptidyl peptidase IV) inhibitor, a proteasome inhibitor, an inhibitor of a phosphoryl transfer reaction in mitochondria, a protein synthesis inhibitor, a kinase inhibitor, a CDK2 (cyclin-dependent kinase 2) inhibitor, a CDK9 (cyclin-dependent kinase 9) inhibitor, a kinesin inhibitor, an HDAC (histone deacetylase) inhibitor, a DNA damaging agent, a DNA alkylating agent, a DNA intercalator, a DNA minor groove binder, a RNA polymerase inhibitor, a topoisomerase inhibitor, or a DHFR (dihydrofolate reductase) inhibitor.

[0608] In one embodiment, the linker is chosen from a cleavable linker, a non-cleavable linker, a hydrophilic linker, a procharged linker, or a dicarboxylic acid based linker.

[0609] In specific embodiments, the ADCs are compounds according to structural formula (I):

[D-L-XY]ₙ-Ab

or salts thereof, where each “D” represents, independently of the others, a cytotoxic and/or cytostatic agent (“drug”); each “L” represents, independently of the others, a linker; “Ab” represents a MBM described herein; each “XY” represents a linkage formed between a functional group R^{x} on the linker and a “complementary” functional group R^{y} on the antibody, and n represents the number of drugs linked to, or drug-to-antibody ratio (DAR), of the ADC.

[0610] Specific embodiments of the various antibodies (Ab) that can comprise the ADCs include the various embodiments of MBMs described above.

[0611] In some specific embodiments of the ADCs and/or salts of structural formula (I), each D is the same and/or each L is the same.

[0612] Specific embodiments of cytotoxic and/or cytostatic agents (D) and linkers (L) that can comprise the ADCs, as well as the number of cytotoxic and/or cytostatic agents linked to the ADCs, are described in more detail below.

[0613] 7.13.1. Cytotoxic and/or Cytostatic Agents

[0614] The cytotoxic and/or cytostatic agents can be any agents known to inhibit the growth and/or replication of and/or kill cells, and in particular cancer and/or tumor cells. Numerous agents having cytotoxic and/or cytostatic properties are known in the literature. Non-limiting examples of classes of cytotoxic and/or cytostatic agents include, by way of example and not limitation, radionuclides, alkylating agents, topoisomerase I inhibitors, topoisomerase II inhibitors, DNA intercalating agents (e.g., groove binding agents such as minor groove binders), RNA/DNA antimetabolites, cell cycle modulators, kinase inhibitors, protein synthesis inhibitors, histone deacetylase inhibitors, mitochondria inhibitors, and antimitotic agents.

[0615] Specific non-limiting examples of agents within certain of these various classes are provided below.

[0616] Alkylating Agents: asaley ((L-Leucine, N-[N-acetyl-4-[bis-(2-chloroethyl)amino]-DL-phenylalanyl]-, ethylester; NSC 167780; CAS Registry No. 3577897)); AZQ ((1,4-cyclohexadiene-1,4-dicarbamic acid, 2,5-bis(1-aziridinyl)-3,6-dioxo-, diethyl ester; NSC 182986; CAS Registry No. 57998682)); BCNU ((N,N′-Bis(2-chloroethyl)-N-nitrosourea; NSC 409962; CAS Registry No. 154938)); busulfan (1,4-butanediol dimethanesulfonate; NSC 750; CAS Registry No. 55981); (carboxyphthalato)platinum (NSC 27164; CAS Registry No. 65296813); CBDCA ((cis-(1,1-cyclobutanedicarboxylato)diammineplatinum(II)); NSC 241240; CAS Registry No. 41575944)); CCNU ((N-(2-chloroethyl)-N′-cyclohexyl-N-nitrosourea; NSC 79037; CAS Registry No. 13010474)); CHIP (iproplatin; NSC 256927); chlorambucil (NSC 3088; CAS Registry No. 305033); chlorozotocin ((2-[[[(2-chloroethyl) nitrosoamino]carbonyl]amino]-2-deoxy-D-glucopyranose; NSC 178248; CAS Registry No. 54749905)); cis-platinum (cisplatin; NSC 119875; CAS Registry No. 15663271); clomesone (NSC 338947; CAS Registry No. 88343720); cyanomorpholinodoxorubicin (NCS 357704; CAS Registry No. 88254073); cyclodisone (NSC 348948; CAS Registry No. 99591738); dianhydrogalactitol (5,6-diepoxydulcitol; NSC 132313; CAS Registry No. 23261203); fluorodopan ((5-[(2-chloroethyl)-(2-fluoroethyl)amino]-6-methyl-uracil; NSC 73754; CAS Registry No. 834913); hepsulfam (NSC 329680; CAS Registry No. 96892578); hycanthone (NSC 142982; CAS Registry No. 23255938); melphalan (NSC 8806; CAS Registry No. 3223072); methyl CCNU ((1-(2-chloroethyl)-3-(trans-4-methylcyclohexane)-1-nitrosourea; NSC 95441; 13909096); mitomycin C (NSC 26980; CAS Registry No. 50077); mitozolamide (NSC 353451; CAS Registry No. 85622953); nitrogen mustard ((bis(2-chloroethyl)methylamine hydrochloride; NSC 762; CAS Registry No. 55867); PCNU ((1-(2-chloroethyl)-3-(2,6-dioxo-3-piperidyl)-1-nitrosourea; NSC 95466; CAS Registry No. 13909029)); piperazine alkylator ((1-(2-chloroethyl)-4-(3-chloropropyl)-piperazine dihydrochloride; NSC 344007)); piperazinedione (NSC 135758; CAS Registry No. 41109802); pipobroman ((N,N-bis(3-bromopropionyl) piperazine; NSC 25154; CAS Registry No. 54911)); porfiromycin (N-methylmitomycin C; NSC 56410; CAS Registry No. 801525); spirohydantoin mustard (NSC 172112; CAS Registry No. 56605164); teroxirone (triglycidylisocyanurate; NSC 296934; CAS Registry No. 2451629); tetraplatin (NSC 363812; CAS Registry No. 62816982); thio-tepa (N,N′,N″-tri-1,2-ethanediylthio phosphoramide; NSC 6396; CAS Registry No. 52244); triethylenemelamine (NSC 9706; CAS Registry No. 51183); uracil nitrogen mustard (desmethyldopan; NSC 34462; CAS Registry No. 66751); Yoshi-864 ((bis(3-mesyloxy propyl)amine hydrochloride; NSC 102627; CAS Registry No. 3458228).

[0617] Topoisomerase I Inhibitors: camptothecin (NSC 94600; CAS Registry No. 7689-03-4); various camptothecin derivatives and analogs (for example, NSC 100880, NSC 603071, NSC 107124, NSC 643833, NSC 629971, NSC 295500, NSC 249910, NSC 606985, NSC 74028, NSC 176323, NSC 295501, NSC 606172, NSC 606173, NSC 610458, NSC 618939, NSC 610457, NSC 610459, NSC 606499, NSC 610456, NSC 364830, and NSC 606497); morpholinisoxorubicin (NSC 354646; CAS Registry No. 89196043); SN-38 (NSC 673596; CAS Registry No. 86639-52-3).

[0618] Topoisomerase II Inhibitors: doxorubicin (NSC 123127; CAS Registry No. 25316409); amonafide (benzisoquinolinedione; NSC 308847; CAS Registry No. 69408817); m-AMSA ((4′-(9-acridinylamino)-3′-methoxymethanesulfonanilide; NSC 249992; CAS Registry No. 51264143)); anthrapyrazole derivative ((NSC 355644); etoposide (VP-16; NSC 141540; CAS Registry No. 33419420); pyrazolo acridine ((pyrazolo[3,4,5-kl]acridine-2(6H)-propanamine, 9-methoxy-N, N-dimethyl-5-nitro-, monomethanesulfonate; NSC 366140; CAS Registry No. 99009219); bisantrene hydrochloride (NSC 337766; CAS Registry No. 71439684); daunorubicin (NSC 821151; CAS Registry No. 23541506); deoxydoxorubicin (NSC 267469; CAS Registry No. 63950061); mitoxantrone (NSC 301739; CAS Registry No. 70476823); menogaril (NSC 269148; CAS Registry No. 71628961); N,N-dibenzyl daunomycin (NSC 268242; CAS Registry No. 70878512); oxanthrazole (NSC 349174; CAS Registry No. 105118125); rubidazone (NSC 164011; CAS Registry No. 36508711); teniposide (VM-26; NSC 122819; CAS Registry No. 29767202).

[0619] DNA Intercalating Agents: anthramycin (CAS Registry No. 4803274); chicamycin A (CAS Registry No. 89675376); tomaymycin (CAS Registry No. 35050556); DC-81 (CAS Registry No. 81307246); sibiromycin (CAS Registry No. 12684332); pyrrolobenzodiazepine derivative (CAS Registry No. 945490095); SGD-1882 ((S)-2-(4-aminophenyl)-7-methoxy-8-(3-4(S)-7-methoxy-2-(4-methoxyphenyl)-5-oxo-5,11a-dihydro-1H-benzo[e]pyrrolo[1,2-a][1,4]diazepin-8-yl)oxy)propoxy)-1H-benzo[e]pyrrolo[1,2-a][1,4]diazepin-5(11aH)-one); SG2000 (SJG-136; (11aS,11a′S)-8,8′-(propane-1,3-diylbis(oxy))bis(7-methoxy-2-methylene-2,3-dihydro-1H-benzo[e]pyrrolo[1,2-a][1,4]diazepin-5(11aH)-one); NSC 694501; CAS Registry No. 232931576).

[0620] RNA/DNA Antimetabolites: L-alanosine (NSC 153353; CAS Registry No. 59163416); 5-azacytidine (NSC 102816; CAS Registry No. 320672); 5-fluorouracil (NSC 19893; CAS Registry No. 51218); acivicin (NSC 163501; CAS Registry No. 42228922); aminopterin derivative N-[2-chloro-5-[[(2,4-diamino-5-methyl-6-quinazolinyl)methyl]amino]benzoyl-]L-aspartic acid (NSC 132483); aminopterin derivative N-[4-[[(2,4-diamino-5-ethyl-6-quinazolinyl)methyl]amino]benzoyl]L-aspartic acid (NSC 184692); aminopterin derivative N-[2-chloro-4-[[(2,4-diamino-6-pteridinyl)methyl]amino]benzoyl]L-aspartic acid monohydrate (NSC 134033); an antifo ((N^{α}-(4-amino-4-deoxypteroyl)-N⁷-hemiphthaloyl-L-ornithine; NSC 623017)); Baker's soluble antifol (NSC 139105; CAS Registry No. 41191042); dichlorallyl lawsone ((2-(3,3-dichloroallyl)-3-hydroxy-1,4-naphthoquinone; NSC 126771; CAS Registry No. 36417160); brequinar (NSC 368390; CAS Registry No. 96201886); ftorafur ((pro-drug; 5-fluoro-1-(tetrahydro-2-furyl)-uracil; NSC 148958; CAS Registry No. 37076689); 5,6-dihydro-5-azacytidine (NSC 264880; CAS Registry No. 62402317); methotrexate (NSC 740; CAS Registry No. 59052); methotrexate derivative (N-[[4-[[(2,4-diamino-6-pteridinyl)methyl]methylamino]-1-naphthalenyl]carbonyl]L-glutamic acid; NSC 174121); PALA ((N-(phosphonoacetyl)-L-aspartate; NSC 224131; CAS Registry No. 603425565); pyrazofurin (NSC 143095; CAS Registry No. 30868305); trimetrexate (NSC 352122; CAS Registry No. 82952645).

[0621] DNA Antimetabolites: 3-HP (NSC 95678; CAS Registry No. 3814797); 2′-deoxy-5-fluorouridine (NSC 27640; CAS Registry No. 50919); 5-HP (NSC 107392; CAS Registry No. 19494894); α-TGDR (α-2′-deoxy-6-thioguanosine; NSC 71851 CAS Registry No. 2133815); aphidicolin glycinate (NSC 303812; CAS Registry No. 92802822); ara C (cytosine arabinoside; NSC 63878; CAS Registry No. 69749); 5-aza-2′-deoxycytidine (NSC 127716; CAS Registry No. 2353335); β-TGDR (β-2′-deoxy-6-thioguanosine; NSC 71261; CAS Registry No. 789617); cyclocytidine (NSC 145668; CAS Registry No. 10212256); guanazole (NSC 1895; CAS Registry No. 1455772); hydroxyurea (NSC 32065; CAS Registry No. 127071); inosine glycodialdehyde (NSC 118994; CAS Registry No. 23590990); macbecin II (NSC 330500; CAS Registry No. 73341738); pyrazoloimidazole (NSC 51143; CAS Registry No. 6714290); thioguanine (NSC 752; CAS Registry No. 154427); thiopurine (NSC 755; CAS Registry No. 50442).

[0622] Cell Cycle Modulators: silibinin (CAS Registry No. 22888-70-6); epigallocatechin gallate (EGCG; CAS Registry No. 989515); procyanidin derivatives (e.g., procyanidin A1 [CAS Registry No. 103883030], procyanidin B1 [CAS Registry No. 20315257], procyanidin B4 [CAS Registry No. 29106512], arecatannin B1 [CAS Registry No. 79763283]); isoflavones (e.g., genistein [4′,5,7-trihydroxyisoflavone; CAS Registry No. 446720], daidzein [4′,7-dihydroxyisoflavone, CAS Registry No. 486668]; indole-3-carbinol (CAS Registry No. 700061); quercetin (NSC 9219; CAS Registry No. 117395); estramustine (NSC 89201; CAS Registry No. 2998574); nocodazole (CAS Registry No. 31430189); podophyllotoxin (CAS Registry No. 518285); vinorelbine tartrate (NSC 608210; CAS Registry No. 125317397); cryptophycin (NSC 667642; CAS Registry No. 124689652).

[0623] Kinase Inhibitors: afatinib (CAS Registry No. 850140726); axitinib (CAS Registry No. 319460850); ARRY-438162 (binimetinib) (CAS Registry No. 606143899); bosutinib (CAS Registry No. 380843754); cabozantinib (CAS Registry No. 1140909483); ceritinib (CAS Registry No. 1032900256); crizotinib (CAS Registry No. 877399525); dabrafenib (CAS Registry No. 1195765457); dasatinib (NSC 732517; CAS Registry No. 302962498); erlotinib (NSC 718781; CAS Registry No. 183319699); everolimus (NSC 733504; CAS Registry No. 159351696); fostamatinib (NSC 745942; CAS Registry No. 901119355); gefitinib (NSC 715055; CAS Registry No. 184475352); ibrutinib (CAS Registry No. 936563961); imatinib (NSC 716051; CAS Registry No. 220127571); lapatinib (CAS Registry No. 388082788); lenvatinib (CAS Registry No. 857890392); mubritinib (CAS 366017096); nilotinib (CAS Registry No. 923288953); nintedanib (CAS Registry No. 656247175); palbociclib (CAS Registry No. 571190302); pazopanib (NSC 737754; CAS Registry No. 635702646); pegaptanib (CAS Registry No. 222716861); ponatinib (CAS Registry No. 1114544318); rapamycin (NSC 226080; CAS Registry No. 53123889); regorafenib (CAS Registry No. 755037037); AP 23573 (ridaforolimus) (CAS Registry No. 572924540); INCB018424 (ruxolitinib) (CAS Registry No. 1092939177); ARRY-142886 (selumetinib) (NSC 741078; CAS Registry No. 606143-52-6); sirolimus (NSC 226080; CAS Registry No. 53123889); sorafenib (NSC 724772; CAS Registry No. 475207591); sunitinib (NSC 736511; CAS Registry No. 341031547); tofacitinib (CAS Registry No. 477600752); temsirolimus (NSC 683864; CAS Registry No. 163635043); trametinib (CAS Registry No. 871700173); vandetanib (CAS Registry No. 443913733); vemurafenib (CAS Registry No. 918504651); SU6656 (CAS Registry No. 330161870); CEP-701 (lesaurtinib) (CAS Registry No. 111358884); XL019 (CAS Registry No. 945755566); PD-325901 (CAS Registry No. 391210109); PD-98059 (CAS Registry No. 167869218); ATP-competitive TORC1/TORC2 inhibitors including PI-103 (CAS Registry No. 371935749), PP242 (CAS Registry No. 1092351671), PP30 (CAS Registry No. 1092788094), Torin 1 (CAS Registry No. 1222998368), LY294002 (CAS Registry No. 154447366), XL-147 (CAS Registry No. 934526893), CAL-120 (CAS Registry No. 870281348), ETP-45658 (CAS Registry No. 1198357797), PX 866 (CAS Registry No. 502632668), GDC-0941 (CAS Registry No. 957054307), BGT226 (CAS Registry No. 1245537681), BEZ235 (CAS Registry No. 915019657), XL-765 (CAS Registry No. 934493762).

[0624] Protein Synthesis Inhibitors: acriflavine (CAS Registry No. 65589700); amikacin (NSC 177001; CAS Registry No. 39831555); arbekacin (CAS Registry No. 51025855); astromicin (CAS Registry No. 55779061); azithromycin (NSC 643732; CAS Registry No. 83905015); bekanamycin (CAS Registry No. 4696768); chlortetracycline (NSC 13252; CAS Registry No. 64722); clarithromycin (NSC 643733; CAS Registry No. 81103119); clindamycin (CAS Registry No. 18323449); clomocycline (CAS Registry No. 1181540); cycloheximide (CAS Registry No. 66819); dactinomycin (NSC 3053; CAS Registry No. 50760); dalfopristin (CAS Registry No. 112362502); demeclocycline (CAS Registry No. 127333); dibekacin (CAS Registry No. 34493986); dihydrostreptomycin (CAS Registry No. 128461); dirithromycin (CAS Registry No. 62013041); doxycycline (CAS Registry No. 17086281); emetine (NSC 33669; CAS Registry No. 483181); erythromycin (NSC 55929; CAS Registry No. 114078); flurithromycin (CAS Registry No. 83664208); framycetin (neomycin B; CAS Registry No. 119040); gentamycin (NSC 82261; CAS Registry No. 1403663); glycylcyclines, such as tigecycline (CAS Registry No. 220620097); hygromycin B (CAS Registry No. 31282049); isepamicin (CAS Registry No. 67814760); josamycin (NSC 122223; CAS Registry No. 16846245); kanamycin (CAS Registry No. 8063078); ketolides such as telithromycin (CAS Registry No. 191114484), cethromycin (CAS Registry No. 205110481), and solithromycin (CAS Registry No. 760981837); lincomycin (CAS Registry No. 154212); lymecycline (CAS Registry No. 992212); meclocycline (NSC 78502; CAS Registry No. 2013583); metacycline (rondomycin; NSC 356463; CAS Registry No. 914001); midecamycin (CAS Registry No. 35457808); minocycline (NSC 141993; CAS Registry No. 10118908); miocamycin (CAS Registry No. 55881077); neomycin (CAS Registry No. 119040); netilmicin (CAS Registry No. 56391561); oleandomycin (CAS Registry No. 3922905); oxazolidinones, such as eperezolid (CAS Registry No. 165800044), linezolid (CAS Registry No. 165800033), posizolid (CAS Registry No. 252260029), radezolid (CAS Registry No. 869884786), ranbezolid (CAS Registry No. 392659380), sutezolid (CAS Registry No. 168828588), tedizolid (CAS Registry No. 856867555); oxytetracycline (NSC 9169; CAS Registry No. 2058460); paromomycin (CAS Registry No. 7542372); penimepicycline (CAS Registry No. 4599604); peptidyl transferase inhibitors, e.g., chloramphenicol (NSC 3069; CAS Registry No. 56757) and derivatives such as azidamfenicol (CAS Registry No. 13838089), florfenicol (CAS Registry No. 73231342), and thiamphenicol (CAS Registry No. 15318453), and pleuromutilins such as retapamulin (CAS Registry No. 224452668), tiamulin (CAS Registry No. 55297955), valnemulin (CAS Registry No. 101312929); pirlimycin (CAS Registry No. 79548735); puromycin (NSC 3055; CAS Registry No. 53792); quinupristin (CAS Registry No. 120138503); ribostamycin (CAS Registry No. 53797356); rokitamycin (CAS Registry No. 74014510); rolitetracycline (CAS Registry No. 751973); roxithromycin (CAS Registry No. 80214831); sisomicin (CAS Registry No. 32385118); spectinomycin (CAS Registry No. 1695778); spiramycin (CAS Registry No. 8025818); streptogramins such as pristinamycin (CAS Registry No. 270076603), quinupristin/dalfopristin (CAS Registry No. 126602899), and virginiamycin (CAS Registry No. 11006761); streptomycin (CAS Registry No. 57921); tetracycline (NSC 108579; CAS Registry No. 60548); tobramycin (CAS Registry No. 32986564); troleandomycin (CAS Registry No. 2751099); tylosin (CAS Registry No. 1401690); verdamicin (CAS Registry No. 49863481).

[0625] Histone Deacetylase Inhibitors: abexinostat (CAS Registry No. 783355602); belinostat (NSC 726630; CAS Registry No. 414864009); chidamide (CAS Registry No. 743420022); entinostat (CAS Registry No. 209783802); givinostat (CAS Registry No. 732302997); mocetinostat (CAS Registry No. 726169739); panobinostat (CAS Registry No. 404950807); quisinostat (CAS Registry No. 875320299); resminostat (CAS Registry No. 864814880); romidepsin (CAS Registry No. 128517077); sulforaphane (CAS Registry No. 4478937); thioureidobutyronitrile (Kevetrin™; CAS Registry No. 6659890); valproic acid (NSC 93819; CAS Registry No. 99661); vorinostat (NSC 701852; CAS Registry No. 149647789); ACY-1215 (rocilinostat; CAS Registry No. 1316214524); CUDC-101 (CAS Registry No. 1012054599); CHR-2845 (tefinostat; CAS Registry No. 914382608); CHR-3996 (CAS Registry No. 1235859138); 4SC-202 (CAS Registry No. 910462430); CG200745 (CAS Registry No. 936221339); SB939 (pracinostat; CAS Registry No. 929016966).

[0626] Mitochondria Inhibitors: pancratistatin (NSC 349156; CAS Registry No. 96281311); rhodamine-123 (CAS Registry No. 63669709); edelfosine (NSC 324368; CAS Registry No. 70641519); d-alpha-tocopherol succinate (NSC 173849; CAS Registry No. 4345033); compound 11β (CAS Registry No. 865070377); aspirin (NSC 406186; CAS Registry No. 50782); ellipticine (CAS Registry No. 519233); berberine (CAS Registry No. 633658); cerulenin (CAS Registry No. 17397896); GX015-070 (Obatoclax®; 1H-Indole, 2-(2-((3,5-dimethyl-1H-pyrrol-2-yl)methylene)-3-methoxy-2H-pyrrol-5-yl)-; NSC 729280; CAS Registry No. 803712676); celastrol (tripterine; CAS Registry No. 34157830); metformin (NSC 91485; CAS Registry No. 1115704); Brilliant green (NSC 5011; CAS Registry No. 633034); ME-344 (CAS Registry No. 1374524556).

[0627] Antimitotic Agents: allocolchicine (NSC 406042); auristatins, such as MMAE (monomethyl auristatin E; CAS Registry No. 474645-27-7) and MMAF (monomethyl auristatin F; CAS Registry No. 745017-94-1; halichondrin B (NSC 609395); colchicine (NSC 757; CAS Registry No. 64868); cholchicine derivative (N-benzoyl-deacetyl benzamide; NSC 33410; CAS Registry No. 63989753); dolastatin 10 (NSC 376128; CAS Registry No 110417-88-4); maytansine (NSC 153858; CAS Registry No. 35846-53-8); rhozoxin (NSC 332598; CAS Registry No. 90996546); taxol (NSC 125973; CAS Registry No. 33069624); taxol derivative ((2′-N-[3-(dimethylamino)propyl]glutaramate taxol; NSC 608832); thiocolchicine (3-demethylthiocolchicine; NSC 361792); trityl cysteine (NSC 49842; CAS Registry No. 2799077); vinblastine sulfate (NSC 49842; CAS Registry No. 143679); vincristine sulfate (NSC 67574; CAS Registry No. 2068782).

[0628] Any of these agents that include or that can be modified to include a site of attachment to a MBM can be included in the ADCs disclosed herein.

[0629] In a specific embodiment, the cytotoxic and/or cytostatic agent is an antimitotic agent.

[0630] In another specific embodiment, the cytotoxic and/or cytostatic agent is an auristatin, for example, monomethyl auristatin E (“MMAE”) or monomethyl auristatin F (“MMAF”).

[0631] 7.13.2. ADC Linkers

[0632] In the ADCs, the cytotoxic and/or cytostatic agents are linked to the MBM by way of ADC linkers. The ADC linker linking a cytotoxic and/or cytostatic agent to the MBM of an ADC can be short, long, hydrophobic, hydrophilic, flexible or rigid, or can be composed of segments that each independently have one or more of the above-mentioned properties such that the linker can include segments having different properties. The linkers can be polyvalent such that they covalently link more than one agent to a single site on the MBM, or monovalent such that covalently they link a single agent to a single site on the MBM.

[0633] As will be appreciated by skilled artisans, the ADC linkers link cytotoxic and/or cytostatic agents to the MBM by forming a covalent linkage to the cytotoxic and/or cytostatic agent at one location and a covalent linkage to the MBM at another. The covalent linkages are formed by reaction between functional groups on the ADC linker and functional groups on the agents and MBM. As used herein, the expression “ADC linker” is intended to include (i) unconjugated forms of the ADC linker that include a functional group capable of covalently linking the ADC linker to a cytotoxic and/or cytostatic agent and a functional group capable of covalently linking the ADC linker to a MBM; (ii) partially conjugated forms of the ADC linker that include a functional group capable of covalently linking the ADC linker to a MBM and that is covalently linked to a cytotoxic and/or cytostatic agent, or vice versa; and (iii) fully conjugated forms of the ADC linker that are covalently linked to both a cytotoxic and/or cytostatic agent and a MBM. In some specific embodiments of ADC linkers and ADCs, as well as synthons used to conjugate linker-agents to MBMs, moieties comprising the functional groups on the ADC linker and covalent linkages formed between the ADC linker and MBM are specifically illustrated as Rₓ and XY, respectively.

[0634] The ADC linkers are preferably, but need not be, chemically stable to conditions outside the cell, and can be designed to cleave, immolate and/or otherwise specifically degrade inside the cell. Alternatively, ADC linkers that are not designed to specifically cleave or degrade inside the cell can be used. Choice of stable versus unstable ADC linker can depend upon the toxicity of the cytotoxic and/or cytostatic agent. For agents that are toxic to normal cells, stable linkers are preferred. Agents that are selective or targeted and have lower toxicity to normal cells can utilize, chemical stability of the ADC linker to the extracellular milieu is less important. A wide variety of ADC linkers useful for linking drugs to MBMs in the context of ADCs are known in the art. Any of these ADC linkers, as well as other ADC linkers, can be used to link the cytotoxic and/or cytostatic agents to the MBM of the ADCs of the disclosure.

[0635] Exemplary polyvalent ADC linkers that can be used to link many cytotoxic and/or cytostatic agents to a single MBM molecule are described, for example, in WO 2009/073445; WO 2010/068795; WO 2010/138719; WO 2011/120053; WO 2011/171020; WO 2013/096901; WO 2014/008375; WO 2014/093379; WO 2014/093394; WO 2014/093640. For example, the Fleximer linker technology developed by Mersana et al. has the potential to enable high-DAR ADCs with good physicochemical properties. As shown below, the Mersana technology is based on incorporating drug molecules into a solubilizing poly-acetal backbone via a sequence of ester bonds. The methodology renders highly loaded ADCs (DAR up to 20) while maintaining good physicochemical properties.

[0636] Additional examples of dendritic type linkers can be found in US 2006/116422; US 2005/271615; de Groot et al., 2003, Angew. Chem. Int. Ed. 42:4490-4494; Amir et al., 2003, Angew. Chem. Int. Ed. 42:4494-4499; Shamis et al., 2004, J. Am. Chem. Soc. 126:1726-1731; Sun et al., 2002, Bioorganic & Medicinal Chemistry Letters 12:2213-2215; Sun et al., 2003, Bioorganic & Medicinal Chemistry 11:1761-1768; King et al., 2002, Tetrahedron Letters 43:1987-1990.

[0637] Exemplary monovalent ADC linkers that can be used are described, for example, in Nolting, 2013, Antibody-Drug Conjugates, Methods in Molecular Biology 1045:71-100; Kitson et al., 2013, CROs-MOs-Chemica-ggi—Chemistry Today 31(4):30-38; Ducry et al., 2010, Bioconjugate Chem. 21:5-13; Zhao et al., 2011, J. Med. Chem. 54:3606-3623; U.S. Pat. Nos. 7,223,837; 8,568,728; 8,535,678; and WO2004010957.

[0638] By way of example and not limitation, some cleavable and noncleavable ADC linkers that can be included in the ADCs are described below.

[0639] 7.13.2.1. Cleavable ADC Linkers

[0640] In certain embodiments, the ADC linker selected is cleavable in vivo. Cleavable ADC linkers can include chemically or enzymatically unstable or degradable linkages. Cleavable ADC linkers generally rely on processes inside the cell to liberate the drug, such as reduction in the cytoplasm, exposure to acidic conditions in the lysosome, or cleavage by specific proteases or other enzymes within the cell. Cleavable ADC linkers generally incorporate one or more chemical bonds that are either chemically or enzymatically cleavable while the remainder of the ADC linker is noncleavable. In certain embodiments, an ADC linker comprises a chemically labile group such as hydrazone and/or disulfide groups. Linkers comprising chemically labile groups exploit differential properties between the plasma and some cytoplasmic compartments. The intracellular conditions to facilitate drug release for hydrazone containing ADC linkers are the acidic environment of endosomes and lysosomes, while the disulfide containing ADC linkers are reduced in the cytosol, which contains high thiol concentrations, e.g., glutathione. In certain embodiments, the plasma stability of an ADC linker comprising a chemically labile group can be increased by introducing steric hindrance using substituents near the chemically labile group.

[0641] Acid-labile groups, such as hydrazone, remain intact during systemic circulation in the blood's neutral pH environment (pH 7.3-7.5), undergo hydrolysis, and release the drug once the ADC is internalized into mildly acidic endosomal (pH 5.0-6.5) and lysosomal (pH 4.5-5.0) compartments of the cell. This pH dependent release mechanism has been associated with nonspecific release of the drug. To increase the stability of the hydrazone group of the ADC linker, the ADC linker can be varied by chemical modification, e.g., substitution, allowing tuning to achieve more efficient release in the lysosome with a minimized loss in circulation.

[0642] Hydrazone-containing ADC linkers can contain additional cleavage sites, such as additional acid-labile cleavage sites and/or enzymatically labile cleavage sites. ADCs including exemplary hydrazone-containing ADC linkers include the following structures:

[chemical structure]

wherein D and Ab represent the cytotoxic and/or cytostatic agent (drug) and Ab, respectively, and n represents the number of drug-ADC linkers linked to the MBM. In certain ADC linkers such as linker (Ig), the ADC linker comprises two cleavable groups—a disulfide and a hydrazone moiety. For such ADC linkers, effective release of the unmodified free drug requires acidic pH or disulfide reduction and acidic pH. Linkers such as (1h) and (Ii) have been shown to be effective with a single hydrazone cleavage site.

[0643] Additional ADC linkers which remain intact during systemic circulation and undergo hydrolysis and release the drug when the ADC is internalized into acidic cellular compartments include carbonates. Such ADC linkers can be useful in cases where the cytotoxic and/or cytostatic agent can be covalently attached through an oxygen.

[0644] Other acid-labile groups that can be included in ADC linkers include cis-aconityl-containing ADC linkers. cis-Aconityl chemistry uses a carboxylic acid juxtaposed to an amide bond to accelerate amide hydrolysis under acidic conditions.

[0645] Cleavable ADC linkers can also include a disulfide group. Disulfides are thermodynamically stable at physiological pH and are designed to release the drug upon internalization inside cells, wherein the cytosol provides a significantly more reducing environment compared to the extracellular environment. Scission of disulfide bonds generally requires the presence of a cytoplasmic thiol cofactor, such as (reduced) glutathione (GSH), such that disulfide-containing ADC linkers are reasonably stable in circulation, selectively releasing the drug in the cytosol. The intracellular enzyme protein disulfide isomerase, or similar enzymes capable of cleaving disulfide bonds, can also contribute to the preferential cleavage of disulfide bonds inside cells. GSH is reported to be present in cells in the concentration range of 0.5-10 mM compared with a significantly lower concentration of GSH or cysteine, the most abundant low-molecular weight thiol in circulation. Where irregular blood flow leads to a hypoxic state, this results in enhanced activity of reductive enzymes and therefore even higher glutathione concentrations. In certain embodiments, the in vivo stability of a disulfide-containing ADC linker can be enhanced by chemical modification of the ADC linker, e.g., use of steric hindrance adjacent to the disulfide bond.

[0646] ADCs including exemplary disulfide-containing ADC linkers include the following structures:

[chemical structure]

wherein D and Ab represent the drug and MBM, respectively, n represents the number of drug-ADC linkers linked to the MBM and R is independently selected at each occurrence from hydrogen or alkyl, for example. In certain embodiments, increasing steric hindrance adjacent to the disulfide bond increases the stability of the ADC linker. Structures such as (Ij) and (II) show increased in vivo stability when one or more R groups is selected from a lower alkyl such as methyl.

[0647] Another type of cleavable ADC linker that can be used is an ADC linker that is specifically cleaved by an enzyme. Such ADC linkers are typically peptide-based or include peptidic regions that act as substrates for enzymes. Peptide based ADC linkers tend to be more stable in plasma and extracellular milieu than chemically labile ADC linkers. Peptide bonds generally have good serum stability, as lysosomal proteolytic enzymes have very low activity in blood due to endogenous inhibitors and the unfavorably high pH value of blood compared to lysosomes. Release of a drug from a MBM occurs specifically due to the action of lysosomal proteases, e.g., cathepsin and plasmin. These proteases can be present at elevated levels in certain tumor cells.

[0648] In exemplary embodiments, the cleavable peptide is selected from tetrapeptides such as Gly-Phe-Leu-Gly (SEQ ID NO:131), Ala-Leu-Ala-Leu (SEQ ID NO:132) or dipeptides such as Val-Cit, Val-Ala, Met-(D)Lys, Asn-(D)Lys, Val-(D)Asp, Phe-Lys, Ile-Val, Asp-Val, His-Val, NorVal-(D)Asp, Ala-(D)Asp 5, Met-Lys, Asn-Lys, Ile-Pro, Me3Lys-Pro, PhenylGly-(D)Lys, Met-(D)Lys, Asn-(D)Lys, Pro-(D)Lys, Met-(D)Lys, Asn-(D)Lys, AM Met-(D)Lys, Asn-(D)Lys, AW Met-(D)Lys, and Asn-(D)Lys. In certain embodiments, dipeptides are preferred over longer polypeptides due to hydrophobicity of the longer peptides.

[0649] A variety of dipeptide-based cleavable ADC linkers useful for linking drugs such as doxorubicin, mitomycin, camptothecin, pyrrolobenzodiazepine, tallysomycin and auristatin/auristatin family members to MBMs have been described (see, Dubowchik et al., 1998, J. Org. Chem. 67:1866-1872; Dubowchik et al., 1998, Bioorg. Med. Chem. Lett. 8(21):3341-3346; Walker et al., 2002, Bioorg. Med. Chem. Lett. 12:217-219; Walker et al., 2004, Bioorg. Med. Chem. Lett. 14:4323-4327; Sutherland et al., 2013, Blood 122: 1455-1463; and Francisco et al., 2003, Blood 102:1458-1465). All of these dipeptide ADC linkers, or modified versions of these dipeptide ADC linkers, can be used in the ADCs of the disclosure. Other dipeptide ADC linkers that can be used include those found in ADCs such as Seattle Genetics' Brentuximab Vendotin SGN-35 (Adcetris™), Seattle Genetics SGN-75 (anti-CD-70, Val-Cit-monomethyl auristatin F(MMAF), Seattle Genetics SGN-CD33A (anti-CD-33, Val-Ala-(SGD-1882)), Celldex Therapeutics glembatumumab (CDX-011) (anti-NMB, Val-Cit-monomethyl auristatin E (MMAE), and Cytogen PSMA-ADC (PSMA-ADC-1301) (anti-PSMA, Val-Cit-MMAE).

[0650] Enzymatically cleavable ADC linkers can include a self-immolative spacer to spatially separate the drug from the site of enzymatic cleavage. The direct attachment of a drug to a peptide ADC linker can result in proteolytic release of an amino acid adduct of the drug, thereby impairing its activity. The use of a self-immolative spacer allows for the elimination of the fully active, chemically unmodified drug upon amide bond hydrolysis.

[0651] One self-immolative spacer is the bifunctional para-aminobenzyl alcohol group, which is linked to the peptide through the amino group, forming an amide bond, while amine containing drugs can be attached through carbamate functionalities to the benzylic hydroxyl group of the ADC linker (PABC). The resulting prodrugs are activated upon protease-mediated cleavage, leading to a 1,6-elimination reaction releasing the unmodified drug, carbon dioxide, and remnants of the ADC linker group. The following scheme depicts the fragmentation of p-amidobenzyl ether and release of the drug:

[chemical structure]

[0652] wherein X-D represents the unmodified drug.

[0653] Heterocyclic variants of this self-immolative group have also been described. See for example, U.S. Pat. No. 7,989,434.

[0654] In some embodiments, the enzymatically cleavable ADC linker is a β-glucuronic acid-based ADC linker. Facile release of the drug can be realized through cleavage of the β-glucuronide glycosidic bond by the lysosomal enzyme β-glucuronidase. This enzyme is present abundantly within lysosomes and is overexpressed in some tumor types, while the enzyme activity outside cells is low. β-Glucuronic acid-based ADC linkers can be used to circumvent the tendency of an ADC to undergo aggregation due to the hydrophilic nature of β-glucuronides. In some embodiments, β-glucuronic acid-based ADC linkers are preferred as ADC linkers for ADCs linked to hydrophobic drugs. The following scheme depicts the release of the drug from and ADC containing a β-glucuronic acid-based ADC linker:

[chemical structure]

[0655] A variety of cleavable β-glucuronic acid-based ADC linkers useful for linking drugs such as auristatins, camptothecin and doxorubicin analogues, CBI minor-groove binders, and psymberin to MBMs have been described (see, see Nolting, Chapter 5 “Linker Technology in Antibody-Drug Conjugates,” In: Antibody-Drug Conjugates: Methods in Molecular Biology, vol. 1045, pp. 71-100, Laurent Ducry (Ed.), Springer Science & Business Medica, LLC, 2013; Jeffrey et al., 2006, Bioconjug. Chem. 17:831-840; Jeffrey et al., 2007, Bioorg. Med. Chem. Lett. 17:2278-2280; and Jiang et al., 2005, J. Am. Chem. Soc. 127:11254-11255). All of these β-glucuronic acid-based ADC linkers can be used in the ADCs of the disclosure.

[0656] Additionally, cytotoxic and/or cytostatic agents containing a phenol group can be covalently bonded to an ADC linker through the phenolic oxygen. One such ADC linker, described in WO 2007/089149, relies on a methodology in which a diamino-ethane “SpaceLink” is used in conjunction with traditional “PABO”-based self-immolative groups to deliver phenols. The cleavage of the ADC linker is depicted schematically below, where D represents a cytotoxic and/or cytostatic agent having a phenolic hydroxyl group.

[chemical structure]

[0657] Cleavable ADC linkers can include noncleavable portions or segments, and/or cleavable segments or portions can be included in an otherwise non-cleavable ADC linker to render it cleavable. By way of example only, polyethylene glycol (PEG) and related polymers can include cleavable groups in the polymer backbone. For example, a polyethylene glycol or polymer ADC linker can include one or more cleavable groups such as a disulfide, a hydrazone or a dipeptide.

[0658] Other degradable linkages that can be included in ADC linkers include ester linkages formed by the reaction of PEG carboxylic acids or activated PEG carboxylic acids with alcohol groups on a biologically active agent, wherein such ester groups generally hydrolyze under physiological conditions to release the biologically active agent. Hydrolytically degradable linkages include, but are not limited to, carbonate linkages; imine linkages resulting from reaction of an amine and an aldehyde; phosphate ester linkages formed by reacting an alcohol with a phosphate group; acetal linkages that are the reaction product of an aldehyde and an alcohol; orthoester linkages that are the reaction product of a formate and an alcohol; and oligonucleotide linkages formed by a phosphoramidite group, including but not limited to, at the end of a polymer, and a 5′ hydroxyl group of an oligonucleotide.

[0659] In certain embodiments, the ADC linker comprises an enzymatically cleavable peptide moiety, for example, an ADC linker comprising structural formula (IVa) or (IVb):

[chemical structure]

[0660] or a salt thereof, wherein: peptide represents a peptide (illustrated C→N and not showing the carboxy and amino “termini”) cleavable by a lysosomal enzyme; T represents a polymer comprising one or more ethylene glycol units or an alkylene chain, or combinations thereof; R^{a} is selected from hydrogen, alkyl, sulfonate and methyl sulfonate; p is an integer ranging from 0 to 5; q is 0 or 1; x is 0 or 1; y is 0 or 1; [symbol] represents the point of attachment of the ADC linker to a cytotoxic and/or cytostatic agent; and * represents the point of attachment to the remainder of the ADC linker.

[0661] In certain embodiments, the peptide is selected from a tripeptide or a dipeptide. In particular embodiments, the dipeptide is selected from: Val-Cit; Cit-Val; Ala-Ala; Ala-Cit; Cit-Ala; Asn-Cit; Cit-Asn; Cit-Cit; Val-Glu; Glu-Val; Ser-Cit; Cit-Ser; Lys-Cit; Cit-Lys; Asp-Cit; Cit-Asp; Ala-Val; Val-Ala; Phe-Lys; Val-Lys; Ala-Lys; Phe-Cit; Leu-Cit; Ile-Cit; Phe-Arg; and Trp-Cit. In certain embodiments, the dipeptide is selected from: Cit-Val; and Ala-Val.

[0662] Specific exemplary embodiments of ADC linkers according to structural formula (IVa) that can be included in the ADCs include the ADC linkers illustrated below (as illustrated, the ADC linkers include a group suitable for covalently linking the ADC linker to a MBM):

[chemical structure]

[chemical structure]

[0663] Specific exemplary embodiments of ADC linkers according to structural formula (IVb) that can be included in the ADCs include the ADC linkers illustrated below (as illustrated, the ADC linkers include a group suitable for covalently linking the ADC linker to a MBM):

[chemical structure]

[chemical structure]

[chemical structure]

[chemical structure]

[chemical structure]

[0664] In certain embodiments, the ADC linker comprises an enzymatically cleavable peptide moiety, for example, an ADC linker comprising structural formula (IVc) or (IVd):

[chemical structure]

or a salt thereof, wherein: peptide represents a peptide (illustrated C→N and not showing the carboxy and amino “termini”) cleavable by a lysosomal enzyme; T represents a polymer comprising one or more ethylene glycol units or an alkylene chain, or combinations thereof; R^{a} is selected from hydrogen, alkyl, sulfonate and methyl sulfonate; p is an integer ranging from 0 to 5; q is 0 or 1; x is 0 or 1; y is 0 or 1; .x [symbol] represents the point of attachment of the ADC linker to a cytotoxic and/or cytostatic agent; and * represents the point of attachment to the remainder of the ADC linker.

[0665] Specific exemplary embodiments of ADC linkers according to structural formula (IVc) that can be included in the ADCs include the ADC linkers illustrated below (as illustrated, the ADC linkers include a group suitable for covalently linking the ADC linker to a MBM):

[chemical structure]

[0666] Specific exemplary embodiments of ADC linkers according to structural formula (IVd) that can be included in the ADCs include the ADC linkers illustrated below (as illustrated, the ADC linkers include a group suitable for covalently linking the ADC linker to a MBM):

[chemical structure]

[chemical structure]

[chemical structure]

[chemical structure]

[0667] In certain embodiments, the ADC linker comprising structural formula (IVa), (IVb), (IVc), or (IVd) further comprises a carbonate moiety cleavable by exposure to an acidic medium. In particular embodiments, the ADC linker is attached through an oxygen to a cytotoxic and/or cytostatic agent.

[0668] 7.13.2.2. Non-Cleavable Linkers

[0669] Although cleavable ADC linkers can provide certain advantages, the ADC linkers comprising the ADCs need not be cleavable. For noncleavable ADC linkers, the release of drug does not depend on the differential properties between the plasma and some cytoplasmic compartments. The release of the drug is postulated to occur after internalization of the ADC via antigen-mediated endocytosis and delivery to lysosomal compartment, where the MBM is degraded to the level of amino acids through intracellular proteolytic degradation. This process releases a drug derivative, which is formed by the drug, the ADC linker, and the amino acid residue to which the ADC linker was covalently attached. The amino acid drug metabolites from conjugates with noncleavable ADC linkers are more hydrophilic and generally less membrane permeable, which leads to less bystander effects and less nonspecific toxicities compared to conjugates with a cleavable ADC linker. In general, ADCs with noncleavable ADC linkers have greater stability in circulation than ADCs with cleavable ADC linkers. Non-cleavable ADC linkers can be alkylene chains, or maybe polymeric in natures, such as, for example, based upon polyalkylene glycol polymers, amide polymers, or can include segments of alkylene chains, polyalkylene glocols and/or amide polymers.

[0670] A variety of non-cleavable ADC linkers used to link drugs to MBMs has been described. See, Jeffrey et al., 2006, Bioconjug. Chem. 17; 831-840; Jeffrey et al., 2007, Bioorg. Med. Chem. Lett. 17:2278-2280; and Jiang et al., 2005, J. Am. Chem. Soc. 127:11254-11255. All of these ADC linkers can be included in the ADCs of the disclosure.

[0671] In certain embodiments, the ADC linker is non-cleavable in vivo, for example an ADC linker according to structural formula (VIa), (VIb), (VIc) or (VId) (as illustrated, the ADC linkers include a group suitable for covalently linking the ADC linker to a MBM:

[chemical structure]

or salts thereof, wherein: R^{a} is selected from hydrogen, alkyl, sulfonate and methyl sulfonate; R^{x} is a moiety including a functional group capable of covalently linking the ADC linker to a MBM; and [symbol] represents the point of attachment of the ADC linker to a cytotoxic and/or cytostatic agent.

[0672] Specific exemplary embodiments of ADC linkers according to structural formula (VIa)-(VId) that can be included in the ADCs include the ADC linkers illustrated below (as illustrated, the ADC linkers include a group suitable for covalently linking the ADC linker to a MBM, and [symbol] represents the point of attachment to a cytotoxic and/or cytostatic agent):

[chemical structure]

[0673] 7.13.2.3. Groups Used to Attach Linkers to MBMs

[0674] A variety of groups can be used to attach ADC linker-drug synthons to MBMs to yield ADCs. Attachment groups can be electrophilic in nature and include: maleimide groups, activated disulfides, active esters such as NHS esters and HOBt esters, haloformates, acid halides, alkyl and benzyl halides such as haloacetamides. As discussed below, there are also emerging technologies related to “self-stabilizing” maleimides and “bridging disulfides” that can be used in accordance with the disclosure. The specific group used will depend, in part, on the site of attachment to the MBM.

[0675] One example of a “self-stabilizing” maleimide group that hydrolyzes spontaneously under MBM conjugation conditions to give an ADC species with improved stability is depicted in the schematic below. See US20130309256 A1; also Lyon et al., Nature Biotech published online, doi:10.1038/nbt.2968.

### Normal System:

[chemical structure]

Leads to “DAR loss” over time

### SGN MaIDPR (Maleimido Dipropylamino) System:

[chemical structure]

[0678] Polytherics has disclosed a method for bridging a pair of sulfhydryl groups derived from reduction of a native hinge disulfide bond. See, Badescu et al., 2014, Bioconjugate Chem. 25:1124-1136. The reaction is depicted in the schematic below. An advantage of this methodology is the ability to synthesize enriched DAR4 ADCs by full reduction of IgGs (to give four pairs of sulfhydryls) followed by reaction with four equivalents of the alkylating agent. ADCs containing “bridged disulfides” are also said to have increased stability.

[chemical structure]

[0679] Similarly, as depicted below, a maleimide derivative (1, below) that is capable of bridging a pair of sulfhydryl groups has been developed. See WO2013/085925.

[chemical structure]

[0680] 7.13.2.4. ADC Linker Selection Considerations

[0681] As is known by skilled artisans, the ADC linker selected for a particular ADC can be influenced by a variety of factors, including but not limited to, the site of attachment to the MBM (e.g., lys, cys or other amino acid residues), structural constraints of the drug pharmacophore and the lipophilicity of the drug. The specific ADC linker selected for an ADC should seek to balance these different factors for the specific MBM/drug combination. For a review of the factors that are influenced by choice of ADC linkers in ADCs, see Nolting, Chapter 5 “Linker Technology in Antibody-Drug Conjugates,” In: Antibody-Drug Conjugates: Methods in Molecular Biology, vol. 1045, pp. 71-100, Laurent Ducry (Ed.), Springer Science & Business Medica, LLC, 2013.

[0682] For example, ADCs have been observed to effect killing of bystander antigen-negative cells present in the vicinity of the antigen-positive tumor cells. The mechanism of bystander cell killing by ADCs has indicated that metabolic products formed during intracellular processing of the ADCs can play a role. Neutral cytotoxic metabolites generated by metabolism of the ADCs in antigen-positive cells appear to play a role in bystander cell killing while charged metabolites can be prevented from diffusing across the membrane into the medium and therefore cannot affect bystander killing. In certain embodiments, the ADC linker is selected to attenuate the bystander killing effect caused by cellular metabolites of the ADC. In certain embodiments, the ADC linker is selected to increase the bystander killing effect.

[0683] The properties of the ADC linker can also influence aggregation of the ADC under conditions of use and/or storage. Typically, ADCs reported in the literature contain no more than 3-4 drug molecules per antibody molecule (see, e.g., Chari, 2008, Acc Chem Res 41:98-107). Attempts to obtain higher drug-to-antibody ratios (“DAR”) often failed, particularly if both the drug and the ADC linker were hydrophobic, due to aggregation of the ADC (King et al., 2002, J Med Chem 45:4336-4343; Hollander et al., 2008, Bioconjugate Chem 19:358-361; Burke et al., 2009 Bioconjugate Chem 20:1242-1250). In many instances, DARs higher than 3-4 could be beneficial as a means of increasing potency. In instances where the cytotoxic and/or cytostatic agent is hydrophobic in nature, it can be desirable to select ADC linkers that are relatively hydrophilic as a means of reducing ADC aggregation, especially in instances where DARS greater than 3-4 are desired. Thus, in certain embodiments, the ADC linker incorporates chemical moieties that reduce aggregation of the ADCs during storage and/or use. An ADC linker can incorporate polar or hydrophilic groups such as charged groups or groups that become charged under physiological pH to reduce the aggregation of the ADCs. For example, an ADC linker can incorporate charged groups such as salts or groups that deprotonate, e.g., carboxylates, or protonate, e.g., amines, at physiological pH.

[0684] Exemplary polyvalent ADC linkers that have been reported to yield DARs as high as 20 that can be used to link numerous cytotoxic and/or cytostatic agents to a MBM are described in WO 2009/073445; WO 2010/068795; WO 2010/138719; WO 2011/120053; WO 2011/171020; WO 2013/096901; WO 2014/008375; WO 2014/093379; WO 2014/093394; WO 2014/093640.

[0685] In particular embodiments, the aggregation of the ADCs during storage or use is less than about 10% as determined by size-exclusion chromatography (SEC). In particular embodiments, the aggregation of the ADCs during storage or use is less than 10%, such as less than about 5%, less than about 4%, less than about 3%, less than about 2%, less than about 1%, less than about 0.5%, less than about 0.1%, or even lower, as determined by size-exclusion chromatography (SEC).

[0686] 7.13.3. Methods of Making ADCs

[0687] The ADCs can be synthesized using chemistries that are well known. The chemistries selected will depend upon, among other things, the identity of the cytotoxic and/or cytostatic agent(s), the ADC linker and the groups used to attach ADC linker to the MBM. Generally, ADCs according to formula (I) can be prepared according to the following scheme:

D-L-R^{x}+Ab-R^{y}→[D-L-XY]ₙ-Ab (I)

[0688] Where D, L, Ab, XY and n are as previously defined, and R^{x} and R^{y} represent complementary groups capable of forming a covalent linkages with one another, as discussed above.

[0689] The identities of groups R^{x} and R^{y} will depend upon the chemistry used to link synthon D-L-R^{x} to the MBM. Generally, the chemistry used should not alter the integrity of the MBM, for example its ability to bind its target. Preferably, the binding properties of the conjugated antibody will closely resemble those of the unconjugated MBM. A variety of chemistries and techniques for conjugating molecules to biological molecules and in particular to immunoglobulins, whose components are typically building blocks of the MBMs, are well-known. See, e.g., Amon et al., “Monoclonal Antibodies For Immunotargeting Of Drugs In Cancer Therapy,” in: Monoclonal Antibodies And Cancer Therapy, Reisfeld et al. Eds., Alan R. Liss, Inc., 1985; Hellstrom et al., “Antibodies For Drug Delivery,” in: Controlled Drug Delivery, Robinson et al. Eds., Marcel Dekker, Inc., 2nd Ed. 1987; Thorpe, “Antibody Carriers Of Cytotoxic Agents In Cancer Therapy: A Review,” in: Monoclonal Antibodies '84: Biological And Clinical Applications, Pinchera et al., Eds., 1985; “Analysis, Results, and Future Prospective of the Therapeutic Use of Radiolabeled Antibody In Cancer Therapy,” in: Monoclonal Antibodies For Cancer Detection And Therapy, Baldwin et al., Eds., Academic Press, 1985; Thorpe et al., 1982, Immunol. Rev. 62:119-58; PCT publication WO 89/12624. Any of these chemistries can be used to link the synthons to a MBM.

[0690] A number of functional groups R^{x} and chemistries useful for linking synthons to accessible lysine residues are known, and include by way of example and not limitation NHS-esters and isothiocyanates.

[0691] A number of functional groups R^{x} and chemistries useful for linking synthons to accessible free sulfhydryl groups of cysteine residues are known, and include by way of example and not limitation haloacetyls and maleimides.

[0692] However, conjugation chemistries are not limited to available side chain groups. Side chains such as amines can be converted to other useful groups, such as hydroxyls, by linking an appropriate small molecule to the amine. This strategy can be used to increase the number of available linking sites on the antibody by conjugating multifunctional small molecules to side chains of accessible amino acid residues of the MBM. Functional groups R^{x} suitable for covalently linking the synthons to these “converted” functional groups are then included in the synthons.

[0693] The MBM can also be engineered to include amino acid residues for conjugation. An approach for engineering MBMs to include non-genetically encoded amino acid residues useful for conjugating drugs in the context of ADCs is described by Axup et al., 2012, Proc Natl Acad Sci USA. 109(40):16101-16106, as are chemistries and functional group useful for linking synthons to the non-encoded amino acids.

[0694] Typically, the synthons are linked to the side chains of amino acid residues of the MBM, including, for example, the primary amino group of accessible lysine residues or the sulfhydryl group of accessible cysteine residues. Free sulfhydryl groups can be obtained by reducing interchain disulfide bonds.

[0695] For linkages where R^{y} is a sulfhydryl group (for example, when R^{x} is a maleimide), the MBM is generally first fully or partially reduced to disrupt interchain disulfide bridges between cysteine residues.

[0696] Cysteine residues that do not participate in disulfide bridges can engineered into a MBM by modification of one or more codons. Introducing these unpaired cysteines yields a sulfhydryl group suitable for conjugation. Preferred positions for incorporating engineered cysteines include, by way of example and not limitation, positions S112C, S113C, A114C, S115C, A176C, S180C, S252C, V286C, V292C, S357C, A359C, S398C, S428C (Kabat numbering) on the human IgG₁ heavy chain and positions V110C, S114C, S121C, S127C, S168C, V205C (Kabat numbering) on the human Ig kappa light chain (see, e.g., U.S. Pat. Nos. 7,521,541, 7,855,275 and 8,455,622).

[0697] As will appreciated by skilled artisans, the number of cytotoxic and/or cytostatic agents linked to a MBM molecule can vary, such that a collection of ADCs can be heterogeneous in nature, where some MBMs contain one linked agent, some two, some three, etc. (and some none). The degree of heterogeneity will depend upon, among other things, the chemistries used for linking the cytotoxic and/or cytostatic agents. For example, where the MBMs are reduced to yield sulfhydryl groups for attachment, heterogeneous mixtures of MBMs having 0, 2, 4, 6 or 8 linked agents per molecule are often produced. Furthermore, by limiting the molar ratio of attachment compound, MBMs having 0, 1, 2, 3, 4, 5, 6, 7 or 8 linked agents per molecule are often produced. Thus, it will be understood that depending upon context, stated drug-antibody ratios (DARs) can be averages for a collection of MBMs. For example, “DAR4” can refer to an ADC preparation that has not been subjected to purification to isolate specific DAR peaks and can comprise a heterogeneous mixture of ADC molecules having different numbers of cytostatic and/or cytotoxic agents attached per MBM (e.g., 0, 2, 4, 6, 8 agents per MBM), but has an average drug-to-MBM ratio of 4. Similarly, in some embodiments, “DAR2” refers to a heterogeneous ADC preparation in which the average drug-to-MBM ratio is 2.

[0698] When enriched preparations are desired, MBMs having defined numbers of linked cytotoxic and/or cytostatic agents can be obtained via purification of heterogeneous mixtures, for example, via column chromatography, e.g., hydrophobic interaction chromatography.

[0699] Purity can be assessed by a variety of methods, as is known in the art. As a specific example, an ADC preparation can be analyzed via HPLC or other chromatography and the purity assessed by analyzing areas under the curves of the resultant peaks.

### 7.14. Pharmaceutical Compositions

[0700] The CD3 binding molecules (e.g., MBMs) (as well as their conjugates; references to CD3 binding molecules, e.g., MBMs, in this disclosure also refers to conjugates comprising the CD binding molecules, such as ADCs, unless the context dictates otherwise) can be formulated as pharmaceutical compositions comprising the CD3 binding molecules, for example containing one or more pharmaceutically acceptable excipients or carriers. To prepare pharmaceutical or sterile compositions comprising the CD3 binding molecules (e.g., MBMs) of the present disclosure a CD3 binding molecules preparation can be combined with one or more pharmaceutically acceptable excipient or carrier.

[0701] For example, formulations of CD3 binding molecules (e.g., MBMs) can be prepared by mixing CD3 binding molecules with physiologically acceptable carriers, excipients, or stabilizers in the form of, e.g., lyophilized powders, slurries, aqueous solutions, lotions, or suspensions (see, e.g., Hardman et al., 2001, Goodman and Gilman's The Pharmacological Basis of Therapeutics, McGraw-Hill, New York, N.Y.; Gennaro, 2000, Remington: The Science and Practice of Pharmacy, Lippincott, Williams, and Wilkins, New York, N.Y.; Avis, et al. (eds.),1993, Pharmaceutical Dosage Forms: General Medications, Marcel Dekker, N.Y.; Lieberman, et al. (eds.), 1990, Pharmaceutical Dosage Forms: Tablets, Marcel Dekker, N.Y.; Lieberman, et al. (eds.), 1990, Pharmaceutical Dosage Forms: Disperse Systems, Marcel Dekker, N.Y.; Weiner and Kotkoskie, 2000, Excipient Toxicity and Safety, Marcel Dekker, Inc., New York, N.Y.).

[0702] Selecting an administration regimen for a CD3 binding molecule (e.g., MBM) depends on several factors, including the serum or tissue turnover rate of the CD3 binding molecule, the level of symptoms, the immunogenicity of the CD3 binding molecule, and the accessibility of the target cells. In certain embodiments, an administration regimen maximizes the amount of CD3 binding molecule delivered to the subject consistent with an acceptable level of side effects. Accordingly, the amount of CD3 binding molecule delivered depends in part on the particular CD3 binding molecule and the severity of the condition being treated. Guidance in selecting appropriate doses of antibodies and small molecules are available (see, e.g., Wawrzynczak, 1996, Antibody Therapy, Bios Scientific Pub. Ltd, Oxfordshire, UK; Kresina (ed.), 1991, Monoclonal Antibodies, Cytokines and Arthritis, Marcel Dekker, New York, N.Y.; Bach (ed.), 1993, Monoclonal Antibodies and Peptide Therapy in Autoimmune Diseases, Marcel Dekker, New York, N.Y.; Baert et al., 2003, New Engl. J. Med. 348:601-608; Milgrom et al., 1999, New Engl. J. Med. 341:1966-1973; Slamon et al., 2001, New Engl. J. Med. 344:783-792; Beniaminovitz et al., 2000, New Engl. J. Med. 342:613-619; Ghosh et al., 2003, New Engl. J. Med. 348:24-32; Lipsky et al., 2000, New Engl. J. Med. 343:1594-1602).

[0703] Determination of the appropriate dose is made by the clinician, e.g., using parameters or factors known or suspected in the art to affect treatment or predicted to affect treatment. Generally, the dose begins with an amount somewhat less than the optimum dose and it is increased by small increments thereafter until the desired or optimum effect is achieved relative to any negative side effects. Important diagnostic measures include those of symptoms of, e.g., the inflammation or level of inflammatory cytokines produced.

[0704] Actual dosage levels of the CD3 binding molecules (e.g., MBMs) in the pharmaceutical compositions of the present disclosure can be varied to obtain an amount of the CD3 binding molecule which is effective to achieve the desired therapeutic response for a particular subject, composition, and mode of administration, without being toxic to the subject. The selected dosage level will depend upon a variety of pharmacokinetic factors including the activity of the particular CD3 binding molecule, the route of administration, the time of administration, the rate of excretion of the particular CD3 binding molecule being employed, the duration of the treatment, other agents (e.g., active agents such as therapeutic drugs or compounds and/or inert materials used as carriers) in combination with the particular CD3 binding molecule employed, the age, sex, weight, condition, general health and prior medical history of the subject being treated, and like factors known in the medical arts.

[0705] Compositions comprising the CD3 binding molecules (e.g., MBMs) can be provided by continuous infusion, or by doses at intervals of, e.g., one day, one week, or 1-7 times per week. Doses can be provided intravenously, subcutaneously, topically, orally, nasally, rectally, intramuscular, intracerebrally, or by inhalation. A specific dose protocol is one involving the maximal dose or dose frequency that avoids significant undesirable side effects.

[0706] An effective amount for a particular subject can vary depending on factors such as the condition being treated, the overall health of the subject, the method route and dose of administration and the severity of side effects (see, e.g., Maynard, et al. (1996) A Handbook of SOPs for Good Clinical Practice, Interpharm Press, Boca Raton, Fla.; Dent (2001) Good Laboratory and Good Clinical Practice, Urch Publ., London, UK).

[0707] The route of administration can be by, e.g., topical or cutaneous application, injection or infusion by intravenous, intraperitoneal, intracerebral, intramuscular, intraocular, intraarterial, intracerebrospinal, intralesional, or by sustained release systems or an implant (see, e.g., Sidman et al., 1983, Biopolymers 22:547-556; Langer et al., 1981, J. Biomed. Mater. Res. 15:167-277; Langer, 1982, Chem. Tech. 12:98-105; Epstein et al., 1985, Proc. Natl. Acad. Sci. USA 82:3688-3692; Hwang et al., 1980, Proc. Natl. Acad. Sci. USA 77:4030-4034; U.S. Pat. Nos. 6,350,466 and 6,316,024). Where necessary, the composition can also include a solubilizing agent and a local anesthetic such as lidocaine to ease pain at the site of the injection. In addition, pulmonary administration can also be employed, e.g., by use of an inhaler or nebulizer, and formulation with an aerosolizing agent. See, e.g., U.S. Pat. Nos. 6,019,968, 5,985,320, 5,985,309, 5,934,272, 5,874,064, 5,855,913, 5,290,540, and 4,880,078; and PCT Publication Nos. WO 92/19244, WO 97/32572, WO 97/44013, WO 98/31346, and WO 99/66903.

[0708] A composition of the present disclosure can also be administered via one or more routes of administration using one or more of a variety of methods known in the art. As will be appreciated by the skilled artisan, the route and/or mode of administration will vary depending upon the desired results. Selected routes of administration for CD3 binding molecules (e.g., MBMs) include intravenous, intramuscular, intradermal, intraperitoneal, subcutaneous, spinal or other general routes of administration, for example by injection or infusion. General administration can represent modes of administration other than enteral and topical administration, usually by injection, and includes, without limitation, intravenous, intramuscular, intraarterial, intrathecal, intracapsular, intraorbital, intracardiac, intradermal, intraperitoneal, transtracheal, subcutaneous, subcuticular, intraarticular, subcapsular, subarachnoid, intraspinal, epidural and intrasternal injection and infusion. Alternatively, a composition can be administered via a non-general route, such as a topical, epidermal or mucosal route of administration, for example, intranasally, orally, vaginally, rectally, sublingually or topically. In one embodiment, the CD3 binding molecules (e.g., MBMs) are administered by infusion. In another embodiment, the CD3 binding molecules (e.g., MBMs) are administered subcutaneously.

[0709] If the CD3 binding molecules (e.g., MBMs) are administered in a controlled release or sustained release system, a pump can be used to achieve controlled or sustained release (see Langer, supra; Sefton, 1987, CRC Crit. Ref Biomed. Eng. 14:20; Buchwald et al., 1980, Surgery 88:507; Saudek et al., 1989, N. Engl. J. Med. 321:574). Polymeric materials can be used to achieve controlled or sustained release of the therapies of the disclosure (see, e.g., Medical Applications of Controlled Release, Langer and Wise (eds.), CRC Pres., Boca Raton, Fla. (1974); Controlled Drug Bioavailability, Drug Product Design and Performance, Smolen and Ball (eds.), Wiley, New York (1984); Ranger and Peppas, 1983, J., Macromol. Sci. Rev. Macromol. Chem. 23:61; see also Levy et al., 1985, Science 228:190; During et al., 1989, Ann. Neurol. 25:351; Howard et al., 1989, J. Neurosurg. 71:105); U.S. Pat. Nos. 5,679,377; 5,916,597; 5,912,015; 5,989,463; 5,128,326; PCT Publication No. WO 99/15154; and PCT Publication No. WO 99/20253. Examples of polymers used in sustained release formulations include, but are not limited to, poly(2-hydroxy ethyl methacrylate), poly(methyl methacrylate), poly(acrylic acid), poly(ethylene-co-vinyl acetate), poly(methacrylic acid), polyglycolides (PLG), polyanhydrides, poly(N-vinyl pyrrolidone), poly(vinyl alcohol), polyacrylamide, poly(ethylene glycol), polylactides (PLA), poly(lactide-co-glycolides) (PLGA), and polyorthoesters. In one embodiment, the polymer used in a sustained release formulation is inert, free of leachable impurities, stable on storage, sterile, and biodegradable. A controlled or sustained release system can be placed in proximity of the prophylactic or therapeutic target, thus requiring only a fraction of the systemic dose (see, e.g., Goodson, in Medical Applications of Controlled Release, supra, vol. 2, pp. 115-138 (1984)).

[0710] Controlled release systems are discussed in the review by Langer (1990, Science 249:1527-1533). Any technique known to one of skill in the art can be used to produce sustained release formulations comprising one or more MBMs of the disclosure. See, e.g., U.S. Pat. No. 4,526,938, PCT publication WO 91/05548, PCT publication WO 96/20698, Ning et al., 1996, Radiotherapy & Oncology 39:179-189, Song et al., 1995, PDA Journal of Pharmaceutical Science & Technology 50:372-397, Cleek et al., 1997, Pro. Intl Symp. Control. Rel. Bioact. Mater. 24:853-854, and Lam et al., 1997, Proc. Intl Symp. Control Rel. Bioact. Mater. 24:759-760.

[0711] If the CD3 binding molecules (e.g., MBMs) are administered topically, they can be formulated in the form of an ointment, cream, transdermal patch, lotion, gel, shampoo, spray, aerosol, solution, emulsion, or other form well known to one of skill in the art. See, e.g., Remington's Pharmaceutical Sciences and Introduction to Pharmaceutical Dosage Forms, 19th ed., Mack Pub. Co., Easton, Pa. (1995). For non-sprayable topical dosage forms, viscous to semi-solid or solid forms comprising a carrier or one or more excipients compatible with topical application and having a dynamic viscosity, in some instances, greater than water are typically employed. Suitable formulations include, without limitation, solutions, suspensions, emulsions, creams, ointments, powders, liniments, salves, and the like, which are, if desired, sterilized or mixed with auxiliary agents (e.g., preservatives, stabilizers, wetting agents, buffers, or salts) for influencing various properties, such as, for example, osmotic pressure. Other suitable topical dosage forms include sprayable aerosol preparations wherein the active ingredient, in some instances, in combination with a solid or liquid inert carrier, is packaged in a mixture with a pressurized volatile (e.g., a gaseous propellant, such as freon) or in a squeeze bottle. Moisturizers or humectants can also be added to pharmaceutical compositions and dosage forms if desired. Examples of such additional ingredients are well known in the art.

[0712] If the compositions comprising the CD3 binding molecules (e.g., MBMs) are administered intranasally, the CD3 binding molecules can be formulated in an aerosol form, spray, mist or in the form of drops. In particular, prophylactic or therapeutic agents for use according to the present disclosure can be conveniently delivered in the form of an aerosol spray presentation from pressurized packs or a nebulizer, with the use of a suitable propellant (e.g., dichlorodifluoromethane, trichlorofluoromethane, dichlorotetrafluoroethane, carbon dioxide or other suitable gas). In the case of a pressurized aerosol the dosage unit can be determined by providing a valve to deliver a metered amount. Capsules and cartridges (composed of, e.g., gelatin) for use in an inhaler or insufflator can be formulated containing a powder mix of the compound and a suitable powder base such as lactose or starch.

[0713] The CD3 binding molecules (e.g., MBMs) can be administered in combination therapy regimens, as described in Section 7.16.

[0714] In certain embodiments, the CD3 binding molecules (e.g., MBMs) can be formulated to ensure proper distribution in vivo. For example, the blood-brain barrier (BBB) excludes many highly hydrophilic compounds. To ensure that the therapeutic compounds of the disclosure cross the BBB (if desired), they can be formulated, for example, in liposomes. For methods of manufacturing liposomes, see, e.g., U.S. Pat. Nos. 4,522,811; 5,374,548; and 5,399,331. The liposomes can comprise one or more moieties which are selectively transported into specific cells or organs, thus enhance targeted drug delivery (see, e.g., Ranade, 1989, J. Clin. Pharmacol. 29:685). Exemplary targeting moieties include folate or biotin (see, e.g., U.S. Pat. No. 5,416,016 to Low et al.); mannosides (Umezawa et al., 1988, Biochem. Biophys. Res. Commun. 153:1038); antibodies (Bloeman et al., 1995, FEBS Lett. 357:140; Owais et al., 1995, Antimicrob. Agents Chemother. 39:180); surfactant protein A receptor (Briscoe et al., 1995, Am. J. Physiol. 1233:134); p 120 (Schreier et al., 1994, J. Biol. Chem. 269:9090); see also Keinanen and Laukkanen, 1994, FEBS Lett. 346:123; Killion and Fidler,1994, Immunomethods 4:273.

[0715] When used in combination therapy, e.g., as described in Section 7.16, a CD3 binding molecule (e.g., MBM) and one or more additional agents can be administered to a subject in the same pharmaceutical composition. Alternatively, the CD3 binding molecule and the additional agent(s) of the combination therapies can be administered concurrently to a subject in separate pharmaceutical compositions.

[0716] The therapeutic methods described herein can further comprise carrying a “companion diagnostic” test whereby a sample from a subject who is a candidate for therapy with a CD3 binding molecule (e.g., MBM) is tested for the expression of the TAA targeted by ABM2 and/or is tested for the expression of the TAA targeted by ABM3 (when ABM3 targets a TAA). The companion diagnostic test can be performed prior to initiating therapy with a CD3 binding molecule (e.g., MBM) and/or during a therapeutic regimen with a CD3 binding molecule (e.g., MBM) to monitor the subject's continued suitability for CD3 binding molecule therapy. The agent used in the companion diagnostic can be the CD3 binding molecule (e.g., MBM) itself or another diagnostic agent, for example a labeled monospecific antibody against the TAA recognized by ABM2 (or ABM3) or a nucleic acid probe to detect TAA RNA. The sample that can be tested in a companion diagnostic assay can be any sample in which the cells targeted by the CD3 binding molecule (e.g., MBM) can be present, from example a tumor (e.g., a solid tumor) biopsy, lymph, stool, urine, blood or any other bodily fluid that might contain circulating tumor cells.

### 7.15. Therapeutic Indications

[0717] The CD3 binding molecules (e.g., MBMs) can be used in the treatment of immune (e.g., autoimmune) and inflammatory disease as well as proliferative diseases such as cancer.

[0718] 7.15.1. Cancer

[0719] The MBMs can be used in the treatment of any proliferative disorder (e.g., cancer) that expresses a TAA targeted by such MBMs. In particular embodiments, the cancer is HER2+ cancer, acute lymphoblastic leukemia (ALL), acute myeloid leukemia (AML), adrenocortical carcinoma, anal cancer, appendix cancer, astrocytoma, basal cell carcinoma, brain tumor, bile duct cancer, bladder cancer, bone cancer, breast cancer, bronchial tumor, Burkitt Lymphoma, carcinoma of unknown primary origin, cardiac tumor, cervical cancer, chordoma, chronic lymphocytic leukemia (CLL), chronic myelogenous leukemia (CML), chronic myeloproliferative neoplasm, colon cancer, colorectal cancer, craniopharyngioma, cutaneous T-cell lymphoma, ductal carcinoma, embryonal tumor, endometrial cancer, ependymoma, esophageal cancer, esthesioneuroblastoma, fibrous histiocytoma, Ewing sarcoma, eye cancer, germ cell tumor, gallbladder cancer, gastric cancer, gastrointestinal carcinoid tumor, gastrointestinal stromal tumor, gestational trophoblastic disease, glioma, head and neck cancer, hairy cell leukemia, hepatocellular cancer, histiocytosis, Hodgkin lymphoma, hypopharyngeal cancer, intraocular melanoma, islet cell tumor, Kaposi sarcoma, kidney cancer, Langerhans cell histiocytosis, laryngeal cancer, leukemia, lip and oral cavity cancer, liver cancer, lobular carcinoma in situ, lung cancer, lymphoma, macroglobulinemia, malignant fibrous histiocytoma, melanoma, Merkel cell carcinoma, mesothelioma, metastatic squamous neck cancer with occult primary, midline tract carcinoma involving NUT gene, mouth cancer, multiple endocrine neoplasia syndrome, multiple myeloma, mycosis fungoides, myelodysplastic syndrome, myelodysplastic/myeloproliferative neoplasm, nasal cavity and para-nasal sinus cancer, nasopharyngeal cancer, neuroblastoma, non-Hodgkin lymphoma, non-small cell lung cancer, oropharyngeal cancer, osteosarcoma, ovarian cancer, pancreatic cancer, papillomatosis, paraganglioma, parathyroid cancer, penile cancer, pharyngeal cancer, pheochromocytomas, pituitary tumor, pleuropulmonary blastoma, primary central nervous system lymphoma, prostate cancer, rectal cancer, renal cell cancer, renal pelvis and ureter cancer, retinoblastoma, rhabdoid tumor, salivary gland cancer, Sezary syndrome, skin cancer, small cell lung cancer, small intestine cancer, soft tissue sarcoma, spinal cord tumor, stomach cancer, T-cell lymphoma, teratoid tumor, testicular cancer, throat cancer, thymoma and thymic carcinoma, thyroid cancer, urethral cancer, uterine cancer, vaginal cancer, vulvar cancer, or Wilms tumor.

[0720] Table 18 below shows exemplary indications that MBMs targeting particular TAAs can be used against.

TABLE 18
Examples of Tumor-Associated Antigen Indications

| Target | Exemplary Indication(s) |
|---|---|
| ADRB3 | Ewing sarcoma |
| ALK | NSCLC, ALCL, IMT, neuroblastoma |
| B7H3 | melanoma, osteosarcoma, leukemia, breast, prostate, ovarian, pancreatic, |
| | colorectal cancers |
| BCMA | multiple myeloma, leukemia (e.g., acute lymphoblastic leukemia (“ALL”), |
| | acute myeloid leukemia (“AML”), chronic lymphocytic leukemia (“CLL”), |
| | chronic myeloid leukemia (“CML”) and hairy cell leukemia (“HCL”)); |
| | lymphoma (e.g., Hodgkin's lymphoma, non-Hodgkin's lymphoma, including |
| | diffuse large B-cell lymphoma (“DLBCL”)) |
| Cadherin 17 | gastric, pancreatic, and colorectal adenocarcinomas |
| CAIX | clear-cell renal cell carcinoma, hypoxic solid tumors, head and neck |
| | squamous carcinoma |
| CD123 | leukemia (e.g., ALL, CLL, AML, CML, HCL); lymphoma (e.g., Hodgkin's |
| | lymphoma, non-Hodgkin's lymphoma, e.g., DLBCL); multiple myeloma. In |
| | a preferred embodiment, the indication is AML. |
| CD171 | neuroblastoma, paraganglioma |
| CD179a | B cell malignancies |
| CD19 | leukemia (e.g., ALL, CLL, AML, CML, HCL); lymphoma (e.g., Hodgkin's |
| | lymphoma, non-Hodgkin's lymphoma, e.g., DLBCL); multiple myeloma. |
| CD20 | leukemia (e.g., ALL, CLL, AML, CML, HCL); lymphoma (e.g., Hodgkin's |
| | lymphoma, non-Hodgkin's lymphoma, e.g., DLBCL); multiple myeloma. |
| CD22 | leukemia (e.g., ALL, CLL, AML, CML, HCL); lymphoma (e.g., Hodgkin's |
| | lymphoma, non-Hodgkin's lymphoma, e.g., DLBCL); multiple myeloma; |
| | lung cancer |
| CD24 | ovarian, breast, prostate, bladder, renal, non-small cell carcinomas |
| CD30 | anaplastic large cell lymphoma, embryonal carcinoma, Hodgkin Lymphoma |
| CD32b | B cell malignancies, gastric, pancreatic, esophageal, glioblastoma, breast, |
| | colorectal |
| CD33 | leukemia (e.g., ALL, CLL, AML, CML, HCL); lymphoma (e.g., Hodgkin's |
| | lymphoma, non-Hodgkin's lymphoma, e.g., DLBCL); multiple myeloma. In |
| | a preferred embodiment, the indication is AML. |
| CD38 | leukemia (e.g., ALL, CLL, AML, CML, HCL); lymphoma (e.g., Hodgkin's |
| | lymphoma, non-Hodgkin's lymphoma, e.g., DLBCL); multiple myeloma |
| CD44v6 | colon cancer, head and neck small cell carcinoma |
| CD97 | B cell malignancies, gastric, pancreatic, esophageal, glioblastoma, breast, |
| | colorectal |
| CEA | colorectal carcinoma, gastric carcinoma, pancreatic carcinoma, lung |
| | cancer, breast cancer, medullary thyroid carcinoma |
| CLDN6 | ovarian, breast, lung cancer |
| CLL-1 | leukemia (e.g., ALL, CLL, AML, CML, HCL); lymphoma (e.g., Hodgkin's |
| | lymphoma, non-Hodgkin's lymphoma, e.g., DLBCL); multiple myeloma. In |
| | a preferred embodiment, the indication is AML. |
| CS1 | multiple myeloma |
| EGFR | squamous cell carcinoma of lung, anal cancer, glioblastoma, epithelian |
| | tumors of head and neck, colon cancer |
| EGFRvIII | Glioblastoma |
| EPCAM | gastrointestestinal carcinoma, colorectal cancer |
| EphA2 | kaposi's sarcoma, glioblastoma, solid tumors, glioma |
| Ephrin B2 | thyroid cancer, breast cancer, malignant melanoma |
| ERBB2 | breast, ovarian, gastric cancers, lung adenocarcinoma, non-small cell lung |
| (Her2/neu) | cancer, uterine cancer, uterine serous endometrial carcinoma, salivary duct |
| | carcinoma, |
| FAP | pancreatic cancer, colorectal cancer, metastasis, epithelial cancers, soft |
| | tissue sarcomas |
| FCRL5 | multiple myeloma |
| FLT3 | leukemia (e.g., ALL, CLL, AML, CML, HCL); lymphoma (e.g., Hodgkin's |
| | lymphoma, non-Hodgkin's lymphoma, e.g., DLBCL); multiple myeloma. In |
| | a preferred embodiment, the indication is AML. |
| Folate receptor | ovarian, breast, renal, lung, colorectal, brain cancers |
| alpha | |
| Folate receptor | ovarian cancer |
| beta | |
| Fucosyl GM1 | AML, myeloma |
| GD2 | malignant melanoma, neuroblastoma |
| GD3 | melanoma |
| GloboH | ovarian, gastric, prostate, lung, breast, and pancreatic cancers |
| gp100 | melanoma |
| GPNMB | breast cancer, head and neck cancers |
| GPR20 | GIST |
| GPR64 | Ewing sarcoma, prostate, kidney and lung sarcomas |
| GPRC5D | multiple myeloma |
| HAVCR1 | renal cancer |
| HER3 | colon and gastric cancers |
| HMWMAA | melanoma, glioblastoma, breast cancer |
| IGF-I receptor | breast, prostate, lung cancers |
| IL-11Ra | papillary thyroid cancer, osteosarcoma, colorectal adenocarcinoma, |
| | lymphocytic leukemia |
| IL-13Ra2 | renal cell carcinoma, prostate cancer, gliomas, head and neck cancer, |
| | astrocytoma |
| KIT | myeloid leukemia, kaposi's sarcoma, erythroleukemia, gastrointestinal |
| | stromal tumors |
| KLRG2 | breast cancers, lung cancers and ovarian cancers. |
| LewisY | squamous cell lung carcinoma, lung adenocarcinoma, ovarian carcinoma, |
| | and colorectal adenocarcinoma |
| LMP2 | prostate cancer, Hodgkin's lymphoma, nasopharyngeal carcinoma |
| LRP6 | breast cancer |
| LY6K | breast, lung, ovarian, and cervical cancer |
| LYPD8 | colorectal and gastric cancers |
| Mesothelin | mesothelioma, pancreatic cancer, ovarian cancer, stomach cancer, lung |
| | cancer, endometrial cancer. |
| MUC1 | breast and ovarian cancers, lung, stomach, pancreatic, prostate cancers |
| NCAM | melanoma, Wilms' tumor, small cell lung cancer, neuroblastoma, myeloma, |
| | paraganglioma, pancreatic acinar cell carcinoma, myeloid leukemia |
| NY-BR-1 | breast cancer |
| o-acetyl GD2 | neuroblastoma, melanoma |
| OR51E2 | prostate cancer |
| PANX3 | osteosarcoma |
| PLAC1 | hepatocellular carcinoma |
| Polysialic acid | small cell lung cancer |
| PDGFR-beta | myelomonocytic leukemia, chronic myeloid leukemia, acute myelogenous |
| | leukemia, acute lymphoblastic leukemia |
| PRSS21 | colon cancer, testicular cancer, ovarian cancer |
| PSCA | prostate cancer, gastric and bladder cancers |
| PSMA | prostate cancer, |
| ROR1 | metastatic cancers, chronic lymphocytic leukemia, solid tumors in lung, |
| | breast, ovarian, colon, pancreatic, sarcoma |
| SLC34A2 | bladder cancer |
| SLC39A6 | breast cancer, esophageal cancer |
| SLITRK6 | breast cancer, urothelial cancer, lung cancer |
| SSEA-4 | breast cancer, cancer stem cells, epithelial ovarian carcinoma |
| TACSTD2 | carcinomas, e.g., non-small-cell lung cancer |
| TAG72 | ovarian, breast, colon, lung, pancreatic cancers, gastric cancer |
| TEM1/CD248 | colorectal cancer |
| TEM7R | colorectal cancer |
| Tn | colorectal, breast cancers, cervical, lung, stomach cancers |
| TSHR | thyroid cancer, multiple myeloma |
| Tyrosinase | prostate cancer, melanoma |
| UPK2 | bladder cancer |
| VEGFR2 | ovarian and pancreatic cancers, renal cell carcinoma, colorectal cancer, |
| | medullary thyroid carcinoma |

[0721] Accordingly, the present disclosure provides methods of treating cancer comprising administering to a subject suffering from cancer a MBM which binds to a TAA or combination of TAAs expressed on that type of cancer. In some embodiments, a MBM that targets a TAA identified in Table 18 is can be administered to a subject afflicted with a cancer that Table 18 indicates expressed the TAA. By way of example and not limitation, a MBM that targets EPCAM or folate receptor alpha can be administered to a subject afflicted with colorectal cancer, a MBM that targets BCMA or CD19 can be administered to a subject afflicted with a blood cancer such as multiple myeloma, a MBM that targets PSCA or PCMA can be administered a subject afflicted with prostate cancer, a MBM that targets tyrosinase or GP3 can be administered to a subject afflicted with melanoma, a MBM that targets CD33, CLL-1 or FLT3 can be administered to a subject afflicted with a blood cancer such as acute myeloid leukemia.

[0722] The MBMs (e.g., TBMs) can be used in the treatment of any proliferative disorder (e.g., cancer) that expresses a TAA described in Section 7.10 or combination of TAAs described in Section 7.10 (e.g., a cancer characterized by cancerous cells expressing two TAAs on the same cancerous cell or a cancer characterized by cancerous cells expressing a first TAA and a second TAA on different cancerous cells). In specific embodiments, the cancer is a B cell malignancy. Exemplary types of B cell malignancies that may be targeted include Hodgkin's lymphomas, non-Hodgkin's lymphomas (NHLs), and multiple myeloma. Examples of NHLs include diffuse large B-cell lymphoma (DLBCL), follicular lymphoma, chronic lymphocytic leukemia (CLL)/small lymphocytic lymphoma (SLL), mantle cell lymphoma (MCL), marginal zone lymphomas, Burkitt lymphoma, lymphoplasmacytic lymphoma (Waldenstrom macroglobulinemia), hairy cell leukemia, primary central nervous system (CNS) lymphoma, primary mediastinal large B-cell lymphoma, mediastinal grey-zone lymphoma (MGZL), splenic marginal zone B-cell lymphoma, extranodal marginal zone B-cell lymphoma of MALT, nodal marginal zone B-cell lymphoma, and primary effusion lymphoma.

[0723] In some embodiments, the MBMs are used to treat Hodgkin's lymphoma. In some embodiments, the MBMs are used to treat non-Hodgkin's lymphoma. In some embodiments, the MBMs are used to treat diffuse large B-cell lymphoma (DLBCL). In some embodiments, the MBMs are used to treat follicular lymphoma. In some embodiments, the MBMs are used to treat chronic lymphocytic leukemia (CLL)/small lymphocytic lymphoma (SLL). In some embodiments, the MBMs are used to treat mantle cell lymphoma (MCL). In some embodiments, the MBMs are used to treat marginal zone lymphoma. In some embodiments, the MBMs are used to treat Burkitt lymphoma. In some embodiments, the MBMs are used to treat lymphoplasmacytic lymphoma (Waldenstrom macroglobulinemia). In some embodiments, the MBMs are used to treat hairy cell leukemia. In some embodiments, the MBMs are used to treat primary central nervous system (CNS) lymphoma. In some embodiments, the MBMs are used to treat primary mediastinal large B-cell lymphoma. In some embodiments, the MBMs are used to treat mediastinal grey-zone lymphoma (MGZL). In some embodiments, the MBMs are used to treat splenic marginal zone B-cell lymphoma. In some embodiments, the MBMs are used to treat extranodal marginal zone B-cell lymphoma of MALT. In some embodiments, the MBMs are used to treat nodal marginal zone B-cell lymphoma. In some embodiments, the MBMs are used to treat primary effusion lymphoma. In some embodiments, the MBMs are used to treat a plasmacytic dendritic cell neoplasm. In some embodiments, the MBMs are used to treat multiple myeloma.

[0724] 7.15.2. Autoimmune Diseases

[0725] The CD3 binding molecules (e.g., MBMs) can be used in the treatment of autoimmune disorders, which can result from the loss of B-cell tolerance and the inappropriate production of autoantibodies. Autoimmune disorders that can be treated with the CD3 binding molecules include systemic lupus erythematosus (SLE), Sjögren's syndrome, scleroderma, rheumatoid arthritis (RA), juvenile idiopathic arthritis, graft versus host disease, dermatomyositis, type I diabetes mellitus, Hashimoto's thyroiditis, Graves's disease, Addison's disease, celiac disease, Crohn's Disease, pernicious anaemia, pemphigus vulgaris, vitiligo, autoimmune haemolytic anaemia, idiopathic thrombocytopenic purpura, giant cell arteritis, myasthenia gravis, multiple sclerosis (MS) (e.g., relapsing-remitting MS (RRMS)), glomerulonephritis, Goodpasture's syndrome, bullous pemphigoid, colitis ulcerosa, Guillain-Barré syndrome, chronic inflammatory demyelinating polyneuropathy, anti-phospholipid syndrome, narcolepsy, sarcoidosis, and Wegener's granulomatosis.

[0726] In some embodiments, the CD3 binding molecules are used to treat systemic lupus erythematosus (SLE). In some embodiments, the CD3 binding molecules are used to treat Sjögren's syndrome. In some embodiments, the CD3 binding molecules are used to treat scleroderma. In some embodiments, the CD3 binding molecules are used to treat rheumatoid arthritis (RA). In some embodiments, the CD3 binding molecules are used to treat juvenile idiopathic arthritis. In some embodiments, the CD3 binding molecules are used to treat graft versus host disease. In some embodiments, the CD3 binding molecules are used to treat dermatomyositis. In some embodiments, the CD3 binding molecules are used to treat type I diabetes mellitus. In some embodiments, the CD3 binding molecules are used to treat Hashimoto's thyroiditis. In some embodiments, the CD3 binding molecules are used to treat Graves's disease. In some embodiments, the CD3 binding molecules are used to treat Addison's disease. In some embodiments, the CD3 binding molecules are used to treat celiac disease. In some embodiments, the CD3 binding molecules are used to treat Crohn's Disease. In some embodiments, the CD3 binding molecules are used to treat pernicious anaemia. In some embodiments, the CD3 binding molecules are used to treat pemphigus vulgaris. In some embodiments, the CD3 binding molecules are used to treat vitiligo. In some embodiments, the CD3 binding molecules are used to treat autoimmune haemolytic anaemia. In some embodiments, the CD3 binding molecules are used to treat idiopathic thrombocytopenic purpura. In some embodiments, the CD3 binding molecules are used to treat giant cell arteritis. In some embodiments, the CD3 binding molecules are used to treat myasthenia gravis. In some embodiments, the CD3 binding molecules are used to treat multiple sclerosis (MS). In some embodiments, the MS is relapsing-remitting MS (RRMS). In some embodiments, the CD3 binding molecules are used to treat glomerulonephritis. In some embodiments, the CD3 binding molecules are used to treat Goodpasture's syndrome. In some embodiments, the CD3 binding molecules are used to treat bullous pemphigoid. In some embodiments, the CD3 binding molecules are used to treat colitis ulcerosa. In some embodiments, the CD3 binding molecules are used to treat Guillain-Barré syndrome. In some embodiments, the CD3 binding molecules are used to treat chronic inflammatory demyelinating polyneuropathy. In some embodiments, the CD3 binding molecules are used to treat anti-phospholipid syndrome. In some embodiments, the CD3 binding molecules are used to treat narcolepsy. In some embodiments, the CD3 binding molecules are used to treat sarcoidosis. In some embodiments, the CD3 binding molecules are used to treat Wegener's granulomatosis.

### 7.16. Combination Therapy

[0727] A CD3 binding molecule (e.g., a MBM) can be used in combination other known agents and therapies. For example, the CD3 binding molecules (e.g., MBMs) can be used in treatment regimens in combination with surgery, chemotherapy, antibodies, radiation, peptide vaccines, steroids, cytoxins, proteasome inhibitors, immunomodulatory drugs (e.g., IMiDs), BH3 mimetics, cytokine therapies, stem cell transplant or a combination thereof. Without being bound by theory, it is believed that one of the advantages of the MBMs is that they can circumvent the need for administering separate antibodies, for example to a subject suffering from a B cell malignancy. Accordingly, in certain embodiments, the one or more additional agents do not include an antibody (e.g., rituximab).

[0728] For convenience, an agent that is used in combination with a CD3 binding molecule (e.g., a MBM) is referred to herein as an “additional” agent.

[0729] Administered “in combination,” as used herein, means that two (or more) different treatments are delivered to the subject during the course of the subject's affliction with the disorder, e.g., the two or more treatments are delivered after the subject has been diagnosed with the disorder and before the disorder has been cured or eliminated or treatment has ceased for other reasons. In some embodiments, the delivery of one treatment is still occurring when the delivery of the second begins, so that there is overlap in terms of administration. This is sometimes referred to herein as “simultaneous” or “concurrent delivery.” The term “concurrently” is not limited to the administration of therapies (e.g., a MBM and an additional agent) at exactly the same time, but rather it is meant that a pharmaceutical composition comprising a CD3 binding molecule (e.g., MBM) is administered to a subject in a sequence and within a time interval such that the CD3 binding molecule can act together with the additional therapy(ies) to provide an increased benefit than if they were administered otherwise. For example, each therapy can be administered to a subject at the same time or sequentially in any order at different points in time; however, if not administered at the same time, they should be administered sufficiently close in time to provide the desired therapeutic effect.

[0730] A CD3 binding molecule (e.g., a MBM) and one or more additional agents can be administered simultaneously, in the same or in separate compositions, or sequentially. For sequential administration, the CD3 binding molecule (e.g., MBM) can be administered first, and the additional agent can be administered second, or the order of administration can be reversed.

[0731] The CD3 binding molecule (e.g., MBM) and the additional agent(s) can be administered to a subject in any appropriate form and by any suitable route. In some embodiments, the routes of administration are the same. In other embodiments, the routes of administration are different.

[0732] In other embodiments, the delivery of one treatment ends before the delivery of the other treatment begins.

[0733] In some embodiments of either case, the treatment is more effective because of combined administration. For example, the second treatment is more effective, e.g., an equivalent effect is seen with less of the second treatment, or the second treatment reduces symptoms to a greater extent, than would be seen if the second treatment were administered in the absence of the first treatment, or the analogous situation is seen with the first treatment. In some embodiments, delivery is such that the reduction in a symptom, or other parameter related to the disorder is greater than what would be observed with one treatment delivered in the absence of the other. The effect of the two treatments can be partially additive, wholly additive, or greater than additive. The delivery can be such that an effect of the first treatment delivered is still detectable when the second is delivered.

[0734] The CD3 binding molecules (e.g., MBMs) and/or additional agents can be administered during periods of active disorder, or during a period of remission or less active disease. A CD3 binding molecule (e.g., MBM) can be administered before the treatment with the additional agent(s), concurrently with the treatment with the additional agent(s), post-treatment with the additional agent(s), or during remission of the disorder.

[0735] When administered in combination, the CD3 binding molecule (e.g., MBM) and/or the additional agent(s) can be administered in an amount or dose that is higher, lower or the same than the amount or dosage of each agent used individually, e.g., as a monotherapy.

[0736] The additional agent(s) of the combination therapies of the disclosure can be administered to a subject concurrently. The term “concurrently” is not limited to the administration of therapies (e.g., prophylactic or therapeutic agents) at exactly the same time, but rather it is meant that a pharmaceutical composition comprising a CD3 binding molecule (e.g., a MBM) is administered to a subject in a sequence and within a time interval such that the molecules can act together with the additional therapy(ies) to provide an increased benefit than if they were administered otherwise. For example, each therapy can be administered to a subject at the same time or sequentially in any order at different points in time; however, if not administered at the same time, they should be administered sufficiently close in time to provide the desired therapeutic or prophylactic effect. Each therapy can be administered to a subject separately, in any appropriate form and by any suitable route.

[0737] The CD3 binding molecule (e.g., MBM) and the additional agent(s) can be administered to a subject by the same or different routes of administration.

[0738] The CD3 binding molecules (e.g., MBMs) and the additional agent(s) can be cyclically administered. Cycling therapy involves the administration of a first therapy (e.g., a first prophylactic or therapeutic agent) for a period of time, followed by the administration of a second therapy (e.g., a second prophylactic or therapeutic agent) for a period of time, optionally, followed by the administration of a third therapy (e.g., prophylactic or therapeutic agent) for a period of time and so forth, and repeating this sequential administration, i.e., the cycle in order to reduce the development of resistance to one of the therapies, to avoid or reduce the side effects of one of the therapies, and/or to improve the efficacy of the therapies.

[0739] In certain instances, the one or more additional agents, are other anti-cancer agents, anti-allergic agents, anti-nausea agents (or anti-emetics), pain relievers, cytoprotective agents, and combinations thereof.

[0740] In one embodiment, a CD3 binding molecule (e.g., MBM) can be used in combination with a chemotherapeutic agent. Exemplary chemotherapeutic agents include an anthracycline (e.g., doxorubicin (e.g., liposomal doxorubicin)), a vinca alkaloid (e.g., vinblastine, vincristine, vindesine, vinorelbine), an alkylating agent (e.g., cyclophosphamide, decarbazine, melphalan, ifosfamide, temozolomide), an immune cell antibody (e.g., alemtuzamab, gemtuzumab, rituximab, tositumomab, obinutuzumab, ofatumumab, daratumumab, elotuzumab), an antimetabolite (including, e.g., folic acid antagonists, pyrimidine analogs, purine analogs and adenosine deaminase inhibitors (e.g., fludarabine)), an mTOR inhibitor, a TNFR glucocorticoid induced TNFR related protein (GITR) agonist, a proteasome inhibitor (e.g., aclacinomycin A, gliotoxin or bortezomib), an immunomodulator such as thalidomide or a thalidomide derivative (e.g., lenalidomide).

[0741] General chemotherapeutic agents considered for use in combination therapies include anastrozole (Arimidex®), bicalutamide (Casodex®), bleomycin sulfate (Blenoxane®), busulfan (Myleran®), busulfan injection (Busulfex®), capecitabine (Xeloda®), N4-pentoxycarbonyl-5-deoxy-5-fluorocytidine, carboplatin (Paraplatin®), carmustine (BiCNU®), chlorambucil (Leukeran®), cisplatin (Platinol®), cladribine (Leustatin®), cyclophosphamide (Cytoxan® or Neosar®), cytarabine, cytosine arabinoside (Cytosar-U®), cytarabine liposome injection (DepoCyt®), dacarbazine (DTIC-Dome®), dactinomycin (Actinomycin D, Cosmegan), daunorubicin hydrochloride (Cerubidine®), daunorubicin citrate liposome injection (DaunoXome®), dexamethasone, docetaxel (Taxotere®), doxorubicin hydrochloride (Adriamycin®, Rubex®), etoposide (Vepesid®), fludarabine phosphate (Fludara®), 5-fluorouracil (Adrucil®, Efudex®), flutamide (Eulexin®), tezacitibine, Gemcitabine (difluorodeoxycitidine), hydroxyurea (Hydrea®), Idarubicin (Idamycin®), ifosfamide (IFEX®), irinotecan (Camptosar®), L-asparaginase (ELSPAR®), leucovorin calcium, melphalan (Alkeran®), 6-mercaptopurine (Purinethol®), methotrexate (Folex®), mitoxantrone (Novantrone®), mylotarg, paclitaxel (Taxol®), phoenix (Yttrium90/MX-DTPA), pentostatin, polifeprosan 20 with carmustine implant (Gliadel®), tamoxifen citrate (Nolvadex®), teniposide (Vumon®), 6-thioguanine, thiotepa, tirapazamine (Tirazone®), topotecan hydrochloride for injection (Hycamptin®), vinblastine (Velban®), vincristine (Oncovin®), and vinorelbine (Navelbine®).

[0742] Anti-cancer agents of particular interest for combinations with the CD3 binding molecules (e.g., MBMs) of the present disclosure include: anthracyclines; alkylating agents; antimetabolites; drugs that inhibit either the calcium dependent phosphatase calcineurin or the p70S6 kinase FK506) or inhibit the p70S6 kinase; mTOR inhibitors; immunomodulators; anthracyclines; vinca alkaloids; proteosome inhibitors; GITR agonists; protein tyrosine phosphatase inhibitors; a CDK4 kinase inhibitor; a BTK inhibitor; a MKN kinase inhibitor; a DGK kinase inhibitor; or an oncolytic virus.

[0743] Exemplary alkylating agents include, without limitation, nitrogen mustards, ethylenimine derivatives, alkyl sulfonates, nitrosoureas and triazenes): uracil mustard (Aminouracil Mustard®, Chlorethaminacil®, Demethyldopan®, Desmethyldopan®, Haemanthamine®, Nordopan®, Uracil nitrogen Mustard®, Uracillost®, Uracilmostaza®, Uramustin®, Uramustine®), chlormethine (Mustargen®), cyclophosphamide (Cytoxan®, Neosar®, Clafen®, Endoxan®, Procytox®, Revimmune™), ifosfamide (Mitoxana®), melphalan (Alkeran®), Chlorambucil (Leukeran®), pipobroman (Amedel®, Vercyte®), triethylenemelamine (Hemel®, Hexalen®, Hexastat®), triethylenethiophosphoramine, Temozolomide (Temodar®), thiotepa (Thioplex®), busulfan (Busilvex®, Myleran®), carmustine (BiCNU®), lomustine (CeeNU®), streptozocin (Zanosar®), and Dacarbazine (DTIC-Dome®). Additional exemplary alkylating agents include, without limitation, Oxaliplatin (Eloxatin®); Temozolomide (Temodar® and Temodal®); Dactinomycin (also known as actinomycin-D, Cosmegen®); Melphalan (also known as L-PAM, L-sarcolysin, and phenylalanine mustard, Alkeran®); Altretamine (also known as hexamethylmelamine (HMM), Hexalen®); Carmustine (BiCNU®); Bendamustine (Treanda®); Busulfan (Busulfex® and Myleran®); Carboplatin (Paraplatin®); Lomustine (also known as CCNU, CeeNU®); Cisplatin (also known as CDDP, Platinol® and Platinol®-AQ); Chlorambucil (Leukeran®); Cyclophosphamide (Cytoxan® and Neosar®); Dacarbazine (also known as DTIC, DIC and imidazole carboxamide, DTIC-Dome®); Altretamine (also known as hexamethylmelamine (HMM), Hexalen®); Ifosfamide (Ifex®); Prednumustine; Procarbazine (Matulane®); Mechlorethamine (also known as nitrogen mustard, mustine and mechloroethamine hydrochloride, Mustargen®); Streptozocin (Zanosar®); Thiotepa (also known as thiophosphoamide, TESPA and TSPA, Thioplex®); Cyclophosphamide (Endoxan®, Cytoxan®, Neosar®, Procytox®, Revimmune®); and Bendamustine HCl (Treanda®).

[0744] Exemplary mTOR inhibitors include, e.g., temsirolimus; ridaforolimus (formally known as deferolimus, (1R,2R,4S)-4-[(2R)-2 [(1R,9S,12S,15R,16E,18R,19R,21R,23S,24E,26E,28Z,30S,32S,35R)-1,18-dihydroxy-19,30-dimethoxy-15,17,21,23,29,35-hexamethyl-2,3,10,14,20-pentaoxo-11,36-dioxa-4-azatricyclo[30.3.1.04,9]hexatriaconta-16,24,26,28-tetraen-12-yl]propyl]-2-methoxycyclohexyl dimethylphosphinate, also known as AP23573 and MK8669, and described in PCT Publication No. WO 03/064383); everolimus (Afinitor® or RAD001); rapamycin (AY22989, Sirolimus®); simapimod (CAS 164301-51-3); emsirolimus, (5-{2,4-Bis[(3S)-3-methylmorpholin-4-yl]pyrido[2,3-d]pyrimidin-7-yl}-2-methoxyphenyl)methanol (AZD8055); 2-Amino-8-[trans-4-(2-hydroxyethoxy)cyclohexyl]-6-(6-methoxy-3-pyridinyl)-4-methyl-pyrido[2,3-d]pyrimidin-7(8H)-one (PF04691502, CAS 1013101-36-4); and N2-[1,4-dioxo-4-[[4-(4-oxo-8-phenyl-4H-1-benzopyran-2-yl)morpholinium-4-yl]methoxy]butyl]-L-arginylglycyl-L-α-aspartylL-serine-(SEQ ID NO: 1113), inner salt (SF1126, CAS 936487-67-1), and XL765.

[0745] Exemplary immunomodulators include, e.g., afutuzumab (available from Roche®); pegfilgrastim (Neulasta®); lenalidomide (CC-5013, Revlimid®); thalidomide (Thalomid®), actimid (CC4047); and IRX-2 (mixture of human cytokines including interleukin 1, interleukin 2, and interferon γ, CAS 951209-71-5, available from IRX Therapeutics).

[0746] Exemplary anthracyclines include, e.g., doxorubicin (Adriamycin® and Rubex®); bleomycin (Lenoxane®); daunorubicin (dauorubicin hydrochloride, daunomycin, and rubidomycin hydrochloride, Cerubidine®); daunorubicin liposomal (daunorubicin citrate liposome, DaunoXome®); mitoxantrone (DHAD, Novantrone®); epirubicin (Ellence™); idarubicin (Idamycin®, Idamycin PFS®); mitomycin C (Mutamycin®); geldanamycin; herbimycin; ravidomycin; and desacetylravidomycin.

[0747] Exemplary vinca alkaloids include, e.g., vinorelbine tartrate (Navelbine®), Vincristine (Oncovin®), and Vindesine (Eldisine®)); vinblastine (also known as vinblastine sulfate, vincaleukoblastine and VLB, Alkaban-AQ® and Velban®); and vinorelbine (Navelbine®).

[0748] Exemplary proteosome inhibitors include bortezomib (Velcade®); carfilzomib (PX-171-007, (S)-4-Methyl-N—((S)-1-(((S)-4-methyl-1-((R)-2-methyloxiran-2-yl)-1-oxopentan-2-yl)amino)-1-oxo-3-phenylpropan-2-yl)-2-((S)-2-(2-morpholinoacetamido)-4-phenylbutanamido)-pentanamide); marizomib (NPI-0052); ixazomib citrate (MLN-9708); delanzomib (CEP-18770); and O-Methyl-N-[(2-methyl-5-thiazolyl)carbonyl]-L-seryl-O-methyl-N-[(1S)-2-[(2R)-2-methyl-2-oxiranyl]-2-oxo-1-(phenylmethyl)ethyl]-L-serinamide (ONX-0912).

[0749] Exemplary BH3 mimetics include venetoclax, ABT-737 (4-{4-[(4′-Chloro-2-biphenylyl)methyl]-1-piperazinyl}-N-[(4-{[(2R)-4-(dimethylamino)-1-(phenylsulfanyl)-2-butanyl]amino}-3-nitrophenyl)sulfonyl]benzamide and navitoclax (formerly ABT-263).

[0750] Exemplary gamma secretase inhibitors include compounds of formula (I) or a pharmaceutically acceptable salt thereof;

[chemical structure]

where ring A is aryl or heteroaryl; each of R¹, R², and R⁴ is independently hydrogen, C₁-C₆ alkyl, cycloalkyl, heterocyclyl, cycloalkylalkyl, heterocyclylalkyl, aryl, heteroaryl, aralkyl, or heteroaralkyl, where each C₁-C₆ alkyl, cycloalkyl, heterocyclyl, cycloalkylalkyl, heterocyclylalkyl, aryl, heteroaryl, aralkyl, or heteroaralkyl is substituted with 0-6 independent occurrences of halogen, —OR^{A}, —SR^{A}, —C(O)OR^{A}, —C(O)N(R^{A})(R^{B}), —N(R^{A})(R^{B}), or —C(NR^{C})N(R^{A})(R^{B}); each R^{3a}, R^{3b}, R^{5a}, and R^{5b} is independently hydrogen, halogen, —OH, C₁-C₆ alkyl, C₁-C₆ alkoxy, cycloalkyl, heterocyclyl, cycloalkylalkyl, heterocyclylalkyl, aryl, heteroaryl, aralkyl, or heteroaralkyl, where each C₁-C₆ alkyl, C₁-C₆ alkoxy, cycloalkyl, heterocyclyl, cycloalkylalkyl, heterocyclylalkyl, aryl, heteroaryl, aralkyl, or heteroaralkyl is substituted with 0-6 independent occurrences of halogen, —OH, —OR^{A}, —SR^{A}, —C(O)OR^{A}, —C(O)N(R^{A})(R^{B}), —N(R^{A})(R^{B}), or —C(NR^{C})N(R^{A})(R^{B}); R⁶ is hydrogen, C₁-C₆ alkyl, cycloalkyl, heterocyclyl, cycloalkylalkyl, heterocyclylalkyl, aryl, heteroaryl, aralkyl, or heteroaralkyl, where each C₁-C₆ alkyl, cycloalkyl, heterocyclyl, cycloalkylalkyl, heterocyclylalkyl, aryl, heteroaryl, aralkyl, or heteroaralkyl is substituted with 0-6 independent occurrences of halogen, —OH, or C₁-C₆ alkoxy; and each R^{A}, R^{B}, and R^{C} is independently hydrogen, C₁-C₆ alkyl, cycloalkyl, heterocyclyl, cycloalkylalkyl, heterocyclylalkyl, aryl, heteroaryl, aralkyl, or heteroaralkyl, where each C₁-C₆ alkyl, cycloalkyl, heterocyclyl, cycloalkylalkyl, heterocyclylalkyl, aryl, heteroaryl, aralkyl, or heteroaralkyl is substituted with 0-6 independent occurrences of halogen, —OH, or C₁-C₆ alkoxy.

[0751] In an embodiment, the compound of formula (I) is a compound described in U.S. Pat. No. 7,468,365. In yet another embodiment, the compound is

[chemical structure]

or a pharmaceutically acceptable salt thereof.

[0752] The GSI can be a compound of formula (II) or a pharmaceutically acceptable salt thereof;

[chemical structure]

where ring B is aryl or heteroaryl; L is a bond, C₁-C₆ alkylene, —S(O)₂—, —C(O)—, —N(R^{E})(O)C—, or —OC(O)—; each R⁷ is independently halogen, —OH, C₁-C₆ alkyl, C₁-C₆ alkoxy, cycloalkyl, heterocyclyl, cycloalkylalkyl, heterocyclylalkyl, aryl, heteroaryl, aralkyl, or heteroaralkyl, where each C₁-C₆ alkyl, C₁-C₆ alkoxy, cycloalkyl, heterocyclyl, cycloalkylalkyl, heterocyclylalkyl, aryl, heteroaryl, aralkyl, or heteroaralkyl is independently substituted with 0-6 occurrences of halogen, —OR^{D}, —SR^{D}, —C(O)OR^{D}, —C(O)N(R^{D})(R^{E}), —N(R^{D})(R^{E}), or —C(NR^{F})N(R^{D})(R^{E}); R⁸ is hydrogen, C₁-C₆ alkyl, C₁-C₆ alkoxy, cycloalkyl, heterocyclyl, cycloalkylalkyl, heterocyclylalkyl, aryl, heteroaryl, aralkyl, or heteroaralkyl, where each C₁-C₆ alkyl, C₁-C₆ alkoxy, cycloalkyl, heterocyclyl, cycloalkylalkyl, heterocyclylalkyl, aryl, heteroaryl, aralkyl, or heteroaralkyl is substituted with 0-6 independent occurrences of halogen, —OR^{D}, —SR^{D}, —C(O)OR^{D}, —C(O)N(R^{D})(R^{E}), —N(R^{D})(R^{E}), or —C(NR^{F})N(R^{D})(R^{E}); each of R⁹ and R¹⁰ is independently hydrogen, halogen, —OH, C₁-C₆ alkyl, C₁-C₆ alkoxy, cycloalkyl, heterocyclyl, cycloalkylalkyl, heterocyclylalkyl, aryl, heteroaryl, aralkyl, or heteroaralkyl, where each C₁-C₆ alkyl, C₁-C₆alkoxy, cycloalkyl, heterocyclyl, aryl, heteroaryl, aralkyl, or heteroaralkyl is substituted with 0-6 independent occurrences of halogen, —OR^{D}, —SR^{D}, —C(O)OR^{D}, —C(O)N(R^{D})(R^{E}), —N(R^{D})(R^{E}), or —C(NR^{I})N(R^{G})(R^{H}); each R^{D}, R^{E}, and R^{F} is independently hydrogen, C₁-C₆ alkyl, cycloalkyl, heterocyclyl, cycloalkylalkyl, heterocyclylalkyl, aryl, heteroaryl, aralkyl, or heteroaralkyl, where each C C₁-C₆ alkyl, cycloalkyl, heterocyclyl, cycloalkylalkyl, heterocyclylalkyl, aryl, heteroaryl, aralkyl, or heteroaralkyl is substituted with 0-6 independent occurrences of halogen, —OH, or C₁-C₆ alkoxy; and n is 0, 1, 2, 3, 4, or 5.

[0753] In a further embodiment, the compound of formula (II) is a compound described in U.S. Pat. No. 7,687,666. In yet another embodiment, the compound is

[chemical structure]

or a pharmaceutically acceptable salt thereof.

[0754] In some embodiments, the GSI is a compound is a compound of formula (III) or a pharmaceutically acceptable salt thereof:

[chemical structure]

where each of rings C and D is independently aryl or heteroaryl;
each of R¹¹, R¹², and R¹⁴ is independently hydrogen, C₁-C₆ alkyl, C₁-C₆ alkoxy, cycloalkyl, heterocyclyl, cycloalkylalkyl, heterocyclylalkyl, aryl, heteroaryl, aralkyl, or heteroaralkyl, where each C₁-C₆ alkyl, C₁-C₆ alkoxy, cycloalkyl, heterocyclyl, cycloalkylalkyl, heterocyclylalkyl, aryl, heteroaryl, aralkyl, or heteroaralkyl is substituted with 0-6 independent occurrences of halogen, —OR^{G}, —SR^{G}, —C(O)OR^{G}, —C(O)N(R^{G})(R^{H}), —N(R^{G})(R^{H}), or —C(NR^{I})N(R^{G})(R^{H}); each of R^{13a} and R^{13b} is hydrogen, halogen, —OH, C₁-C₆ alkyl, C₁-C₆ alkoxy, cycloalkyl, heterocyclyl, cycloalkylalkyl, heterocyclylalkyl, aryl, heteroaryl, aralkyl, or heteroaralkyl, where each C₁-C₆alkyl, C₁-C₆ alkoxy, cycloalkyl, heterocyclyl, cycloalkylalkyl, heterocyclylalkyl, aryl, heteroaryl, aralkyl, or heteroaralkyl is substituted with 0-6 independent occurrences of halogen, —OR^{G}, —SR^{G}, —C(O)OR^{G}, —C(O)N(R^{G})(R^{H}), —N(R^{G})(R^{H}), or —C(NR^{I})N(R^{G})(R^{H}); each R¹⁵ and R¹⁶ is independently halogen, —OH, C₁-C₆ alkyl, C₁-C₆ alkoxy, cycloalkyl, heterocyclyl, cycloalkylalkyl, heterocyclylalkyl, aryl, heteroaryl, aralkyl, or heteroaralkyl, where each C₁-C₆ alkyl, C₁-C₆ alkoxy, cycloalkyl, heterocyclyl, cycloalkylalkyl, heterocyclylalkyl, aryl, heteroaryl, aralkyl, or heteroaralkyl is substituted with 0-6 independent occurrences of halogen, —OR^{G}, —SR^{G}, —C(O)OR^{G}, —C(O)N(R^{G})(R^{H}), —N(R^{G})(R^{H}), or —C(NR^{I})N(R^{G})(R^{H}); each R^{G}, R^{H}, and R¹ is independently hydrogen, C₁-C₆ alkyl, cycloalkyl, heterocyclyl, cycloalkylalkyl, heterocyclylalkyl, aryl, heteroaryl, aralkyl, or heteroaralkyl, where each C₁-C₆ alkyl, cycloalkyl, heterocyclyl, cycloalkylalkyl, heterocyclylalkyl, aryl, heteroaryl, aralkyl, or heteroaralkyl is substituted with 0-6 independent occurrences of halogen, —OH, or C₁-C₆ alkoxy; and each of m, n, and p is independently 0, 1, 2, 3, 4, or 5.

[0755] In a further embodiment, the GSI is a compound described in U.S. Pat. No. 8,084,477. In yet another embodiment, the GSI is

[chemical structure]

or a pharmaceutically acceptable salt thereof.

[0756] In some embodiments, the GSI is a compound described in U.S. Pat. No. 7,160,875. In some embodiments, the gamma secretase inhibitor is a compound of formula (IV) or a pharmaceutically acceptable salt thereof:

[chemical structure]

where R¹⁷ is selected from

[chemical structure]

R¹⁸ is lower alkyl, lower alkinyl, —(CH₂)ₙ—O-lower alkyl, —(CH₂)ₙ—S-lower alkyl, —(CH₂)ₙ—CN, —(CR′R″)ₙ—CF₃, —(CR′R″)ₙ—CHF₂, —(CR′R″)ₙ—CH₂F, —(CH₂)ₙ, —C(O)O-lower alkyl, —(CH₂)ₙ-halogen, or is —(CH₂)ₙ-cycloalkyl optionally substituted by one or more substituents selected from the group consisting of phenyl, halogen and CF₃; R′,R″ are each independently hydrogen, lower alkyl, lower alkoxy, halogen or hydroxy; R¹⁹, R²⁰ are each independently hydrogen, lower alkyl, lower alkoxy, phenyl or halogen; R²¹ is hydrogen, lower alkyl, —(CH₂)ₙ—CF₃ or —(CH₂)ₙ-cycloalkyl; R²² is hydrogen or halogen; R²³ is hydrogen or lower alkyl; R²⁴ is hydrogen, lower alkyl, lower alkinyl, —(CH₂)ₙ—CF₃, —(CH₂)ₙ-cycloalkyl or —(CH₂)ₙ-phenyl optionally substituted by halogen; R²⁵ is hydrogen, lower alkyl, —C(O)H, —C(O)-lower alkyl, —C(O)—CF₃, —C(O)—CH₂F, —C(O)—CHF₂, —C(O)— cycloalkyl, —C(O)—(CH₂)ₙ—O-lower alkyl, —C(O)O—(CH₂)ₙ-cycloalkyl, —C(O)-phenyl optionally substituted by one or more substituents selected from the group consisting of halogen and —C(O)O-lower alkyl, or is —S(O)₂-lower alkyl, —S(O)₂—CF₃, —(CH₂)ₙ-cycloalkyl or is —(CH₂)ₙ-phenyl optionally substituted by halogen; n is 0, 1, 2, 3 or 4.

[0757] In some embodiments, the GSI is

[chemical structure]

or a pharmaceutically acceptable salt thereof.

[0758] In some embodiments, the GSI is a compound described in U.S. Pat. No. 6,984,663. In some embodiments, the GSI is a compound of Formula (V) or a pharmaceutically acceptable salt thereof:

[chemical structure]

where
q is 0 or 1; Z represents halogen, —CN, —NO₂, —N₃, —CF₃, —OR^{2a}, —N(R^{2a})₂, CO₂R^{2a}, —OCOR^{2a}, —COR^{2a}, —CON(R^{2a})₂, —OCON(R^{2a})₂, —CONR^{2a}(OR^{2a}), —CON(R^{2a})N(R^{2a})₂, —CONHC(═NOH)R^{2a}, heterocyclyl, phenyl or heteroaryl, the heterocyclyl, phenyl or heteroaryl bearing 0-3 substituents selected from halogen, —CN, —NO₂, —CF₃, —OR^{2a}, —N(R^{2a})₂, CO₂R^{2a}, —COR^{2a}, —CON(R^{2a})₂ and C₁₋₄ alkyl; R²⁷ represents H, C₁₋₄ alkyl, or OH; R²⁶ represents H or C₁₋₄ alkyl; with the proviso that when m is 1, R²⁶ and R²⁷ do not both represent C₁₋₄ alkyl; Ar¹ represents C₆₋₁₀ aryl or heteroaryl, either of which bears 0-3 substituents independently selected from halogen, —CN, —NO₂, —CF₃, —OH, —OCF₃, C₁₋₄ alkoxy or C₁₋₄ alkyl which optionally bears a substituent selected from halogen, CN, NO₂, OF₃, OH and C₁₋₄ alkoxy; Ar² represents C₆₋₁₀ aryl or heteroaryl, either of which bears 0-3 substituents independently selected from halogen, —CN, —NO₂, —CF₃, —OH, —OCF₃, C₁₋₄ alkoxy or C₁₋₄ alkyl which optionally bears a substituent selected from halogen, —CN, —NO₂, —CF₃, —OH and C₁₋₄ alkoxy; R^{2a} represents H, C₁₋₆ alkyl, C₃₋₆ cycloalkyl, C₃₋₆ cycloalkyl, C₁₋₆ alkyl, C₂₋₆ alkenyl, any of which optionally bears a substituent selected from halogen, —CN, —NO₂, —CF₃, —OR^{2b}, —CO₂R^{2b}, —N(R^{2b})₂, CON(R²)₂, Ar and COAr; or R^{2a} represents Ar; or two R^{2a} groups together with a nitrogen atom to which they are mutually attached may complete an N-heterocyclyl group bearing 0-4 substituents independently selected from ═O, ═S, halogen, C₁₋₄ alkyl, —CN, —NO₂, —CF₃, —OH, C₁₋₄ alkoxy, C₁₋₄ alkoxycarbonyl, CO₂H, amino, C₁₋₄ alkylamino, di(C₁₋₄alkyl)amino, carbamoyl, Ar and COAr; R^{2b} represents H, C₁₋₆ alkyl, C₃₋₆ cycloalkyl, C₃₋₆ cycloalkylC₁₋₆ alkyl, C₂₋₆ alkenyl, any of which optionally bears a substituent selected from halogen, —CN, —NO₂, —CF₃, —OH, C₁₋₄ alkoxy, C₁₋₄ alkoxycarbonyl, —CO₂H, amino, C₁₋₄ alkylamino, di(C₁₋₄alkyl)amino, carbamoyl, Ar and COAr; or R^{2b} represents Ar; or two R^{2b} groups together with a nitrogen atom to which they are mutually attached may complete an N-heterocyclyl group bearing 0-4 substituents independently selected from ═O, ═S, halogen, C₁₋₄ alkyl, —CN, —NO₂, CF₃, —OH, C₁₋₄ alkoxy, C₁₋₄ alkoxycarbonyl, —CO₂H, amino, C₁₋₄ alkylamino, di(C₁₋₄alkyl)amino, carbamoyl, Ar and COAr; Ar represents phenyl or heteroaryl bearing 0-3 substituents selected from halogen, C₁₋₄ alkyl, —CN, —NO₂, —CF₃, —OH, C₁₋₄ alkoxy, C₁₋₄ alkoxycarbonyl, amino, C₁₋₄ alkylamino, di(C₁₋₄ alkyl)amino, carbamoyl, C₁₋₄ alkylcarbamoyl and di(C₁₋₄ alkyl)carbamoyl.

[0759] In some embodiments, the GSI is

[chemical structure]

or a pharmaceutically acceptable salt thereof.

[0760] In some embodiments, the GSI is a compound described in U.S. Pat. No. 7,795,447. In some embodiments, the GSI is a compound of formula (VI) or a pharmaceutically acceptable salt thereof.

[chemical structure]

where A′ is absent or selected from

[chemical structure]

### and —S(O)₂—;

[0761] Z is selected from —CH₂, —CH(OH), —CH(C₁-C₆ alkyl), —CH(C₁-C₆ alkoxy), —CH(NR³³R³⁴), —CH(CH₂(OH)), —CH(CH(C₁-C₄ alkyl)(OH)) and —CH(C(C₁-C₄ alkyl)(C₁-C₄ alkyl)(OH)), for example —CH(C(CH₃)(CH₃)(OH)) or —CH(C(CH₃)(CH₂CH₃)(OH)); R²⁷ is selected from C₁-C₂₀ alkyl, C₂-C₂₀ alkenyl, C₂-C₂₀ alkynyl, C₁-C₂₀ alkoxy, C₂-C₂₀ alkenoxy, C₁-C₂₀ hydroxyalkyl, C₃-C₈ cycloalkyl, benzo(C₃-C₈ cycloalkyl), benzo(C₃-C₈ heterocycloalkyl), C₄-C₈ cycloalkenyl, (C₅-C₁₁)bi- or tricycloalkyl, benzo(C₅-C₁₁)bi- or tricycloalkyl, C₇-C₁₁tricycloalkenyl, (3-8 membered) heterocycloalkyl, C₆-C₁₄ aryl and (5-14 membered) heteroaryl, where each hydrogen atom of the alkyl, alkenyl, alkynyl, alkoxy and alkenoxy is optionally independently replaced with halo, and where the cycloalkyl, benzo(C₃-C₈ cycloalkyl), cycloalkenyl, (3-8 membered) heterocycloalkyl, C₆-C₁₄ aryl and (5-14 membered) heteroaryl is optionally independently substituted with from one to four substituents independently selected from C₁-C₁₀ alkyl optionally substituted with from one to three halo atoms, C₁-C₁₀ alkoxy optionally substituted with from one to three halo atoms, C₁-C₁₀ hydroxyalkyl, halo, e.g., fluorine, —OH, —CN,—NR³³R³⁴, —C(═O)NR³³R³⁴, —C(═O)R³⁵, C₃-C₈ cycloalkyl and (3-8 membered) heterocycloalkyl; R²⁸ is selected from H, C₁-C₆ alkyl, C₂-C₆ alkenyl, C₃-C₈ cycloalkyl and C₅-C₈ cycloalkenyl, where R²⁸ is optionally independently substituted with from one to three substituents independently selected from C₁-C₄ alkyl optionally substituted with from one to three halo atoms, C₁-C₄ alkoxy optionally substituted with from one to three halo atoms, halo and —OH; or R²⁷ and R²⁸ together with the A′ group when present and the nitrogen atom to which R2 is attached, or R1 and R2 together with the nitrogen atom to which R²⁷ and R²⁸ are attached when A is absent, may optionally form a four to eight membered ring; R²⁹ is selected from H, C₁-C₆ alkyl, C₂-C₆ alkenyl, C₂-C₆ alkynyl, C₃-C₆ cycloalkyl, C₅-C₆ cycloalkenyl and (3-8 membered) heterocycloalkyl, where the alkyl, alkenyl, alkynyl, cycloalkyl, cycloalkenyl and heterocycloalkyl are each optionally independently substituted with from one to three substituents independently selected from C₁-C₄alkoxy, halo, —OH—S(C₁-C₄)alkyl and (3-8 membered) heterocycloalkyl; R³⁰ is H, C₁-C₆ alkyl or halo; or R3 and R4 may together with the carbon atom to which they are attached optionally form a moiety selected from cyclopropyl, cyclobutyl, cyclopentyl, cyclohexyl, morpholino, piperidino, pyrrolidino, tetrahydrofuranyl and perhydro-2H-pyran, where the moiety formed by R²⁹ and R³⁰ is optionally substituted with from one to three substituents independently selected from C₁-C₆ alkyl optionally substituted with from one to three halo atoms, C₁-C₆ alkoxy optionally substituted with from one to three halo atoms, halo, —OH, —CN and allyl; R³¹ is selected from H, C₁-C₆ alkyl, C₂-C₆ alkylene, C₁-C₆ alkoxy, halo, —CN, C₃-C₁₂ cycloalkyl, C₄-C₁₁ cycloalkenyl and C₆-C₁₀ aryl, (5-10 membered) heteroaryl, where the alkyl, alkylene and alkoxy of R³¹ are each optionally independently substituted with from one to three substituents independently selected from halo and —CN, and where the cycloalkyl, cycloalkenyl and aryl and heteroaryl of R³¹ are each optionally independently substituted with from one to three substituents independently selected from C₁-C₄ alkyl optionally substituted with from one to three halo atoms, C₁-C₄ alkoxy optionally substituted with from one to three halo atoms, halo and —CN; R³² is selected from H, C₁-C₂₀ alkyl, C₁-C₂₀ alkoxy, C₁-C₂₀ hydroxyalkyl, C₃-C₁₂ cycloalkyl, C₄-C₁₂ cycloalkenyl, (C₅-C₂₀) bi- or tricycloalkyl, (C₇-C₂₀)bi- or tricycloalkenyl, (3-12 membered) heterocycloalkyl, (7-20 membered) hetero bi- or heterotricycloalkyl, C₆-C₁₄ aryl and (5-15 membered) heteroaryl, where R³² is optionally independently substituted with from one to four substituents independently selected from C₁-C₂₀ alkyl optionally substituted with from one to three halo atoms, C₁-C₂₀ alkoxy, —OH, —CN, —NO₂, —NR³³R³⁴, —C(═O)NR³³R³⁴, —C(═O)R³⁵, —C(═O)OR³⁵, —S(O)ₙNR³³R³⁴, —S(O)ₙR³⁵, C₃-C₁₂ cycloalkyl, (4-12 membered) heterocycloalkyl optionally substituted with from one to three OH or halo groups, (4-12 membered) heterocycloalkoxy, C₆-C₁₄ aryl, (5-15 membered) heteroaryl, C₆-C₁₂ aryloxy and (5-12 membered) heteroaryloxy; or R6 and R7 may together with the carbon and nitrogen atoms to which they are respectively attached optionally form a (5-8 membered) heterocycloalkyl ring, a (5-8 membered) heterocycloalkenyl ring or a (6-10 membered) heteroaryl ring, where the heterocycloalkyl, heterocycloalkenyl and heteroaryl rings are each optionally independently substituted with from one to three substituents independently selected from halo, C₁-C₆ alkyl, optionally substituted with from one to three halo atoms, C₁-C₆ alkoxy optionally substituted with from one to three halo atoms, C₁-C₆ hydroxyalkyl, —OH, —(CH₂)_{zero-10}NR³³R³⁴, —(CH₂)_{zero-10}C(═O)NR³³R³⁴, —S(O)₂NR³³R³⁴ and C₃-C₁₂ cycloalkyl; R³³ and R³⁴ are each independently selected from H, C₁-C₁₀ alkyl where each hydrogen atom of the C₁-C₁₀ alkyl is optionally independently replaced with a halo atom, e.g., a fluorine atom, C₂-C₁₀ alkenyl, C₂-C₁₀ alkynyl, C₁-C₆ alkoxy where each hydrogen atom of the C₁-C₆ alkoxy is optionally independently replaced with a halo atom, C₂-C₆ alkenoxy, C2-C6 alkynoxy, —C(═O)R11, —S(O)nR11, C₃-C₈ cycloalkyl, C₄-C₈ cycloalkenyl, (C₅-C₁₁)bi- or tricycloalkyl, (C₇-C₁₁)bi- or tricycloalkenyl, (3-8 membered) heterocycloalkyl, C₆-C₁₄ aryl and (5-14 membered) heteroaryl, where the alkyl and alkoxy are each optionally independently substituted with from one to three substituents independently selected from halo and —OH, and where the cycloalkyl, cycloalkenyl, bi- or tricycloalkyl, bi- or tricycloalkenyl, heterocycloalkyl, aryl and heteroaryl are each optionally independently substituted with from one to three substituents independently selected from halo, —OH, C₁-C₆ alkyl optionally independently substituted with from one to six halo atoms, C₂-C₆ alkenyl, C₂-C₆ alkynyl, C₁-C₆ alkoxy, C₂—O₆ alkenoxy, C₂-C₆ alkynoxy and C₁-C₆ hydroxyalkyl; or NR³³R³⁴ may form a (4-7 membered) heterocycloalkyl, where the heterocycloalkyl optionally comprises from one to two further heteroatoms independently selected from N, O, and S, and where the heterocycloalkyl optionally contains from one to three double bonds, and where the heterocycloalkyl is optionally independently substituted with from one to three substituents independently selected from C₁-C₆ alkyl optionally substituted with from one to six halo atoms, C₂-C₆ alkenyl, C₂-C₆ alkynyl, C₁-C₆ alkoxy, C₂—O₆ alkenoxy, C₂-C₆ alkynoxy, C₁-C₆ hydroxyalkyl, C₂-C₆hydroxyalkenyl, C₂-C₆hydroxyalkynyl, halo, —OH, —CN, —NO₂,
—C(═O)R³⁵, —C(═O)OR³⁵, —S(O)ₙR³⁵ and —S(O)ₙNR³³R³⁴; R³⁵ is selected from H, C₁-C₈ alkyl, C₃-C₈ cycloalkyl, C₄-C₈ cycloalkenyl, (C₆-C₁₁)bi- or tricycloalkyl, —(C₇-C₁₁)bi- or tricycloalkenyl, (3-8 membered) heterocycloalkyl, C₆-C₁₀ aryl and (5-14 membered) heteroaryl, where the alkyl of R³⁵ is optionally independently substituted with from one to three substituents independently selected from —OH, —CN and C₃-C₈ cycloalkyl, and where each hydrogen atom of the alkyl is optionally independently replaced with a halo atom, e.g., a fluorine atom, and where the cycloalkyl, cycloalkenyl, heterocycloalkyl, aryl and hetereoaryl of R³⁵ are each optionally independently substituted with from one to three substituents independently selected from halo, C₁-C₈ alkyl optionally substituted with from one to three halo atoms, —OH, —CN and C₃-C₈cycloalkyl; n is in each instance an integer independently selected from zero, 1, 2 and 3; and the pharmaceutically acceptable salts of such compounds.

[0762] In some embodiments, the GSI is

[chemical structure]

or a pharmaceutically acceptable salt thereof.

[0763] In some embodiments, the GSI is an antibody molecule that reduces the expression and/or function of gamma secretase. In some embodiments, the GSI is an antibody molecule targeting a subunit of gamma secretase. In some embodiments, the GSI is chosen from an anti-presenilin antibody molecule, an anti-nicastrin antibody molecule, an anti-APH-1 antibody molecule, or an anti-PEN-2 antibody molecule.

[0764] Exemplary antibody molecules that target a subunit of gamma secretase (e.g., e.g., presenilin, nicastrin, APH-1, or PEN-2) are described in U.S. Pat. Nos. 8,394,376, 8,637,274, and 5,942,400.

[0765] Gamma secretase modulators described in WO 2017/019496 can also be used. In some embodiments, the gamma secretase modulator is γ-secretase inhibitor I (GSI I) Z-Leu-Leu-Norleucine; γ-secretase inhibitor II (GSI II); γ-secretase inhibitor III (GSI III), N-Benzyloxycarbonyl-Leu-leucinal, N-(2-Naphthoyl)-Val-phenylalaninal; γ-secretase inhibitor IV (GSI IV); γ-secretase inhibitor V (GSI V), N-Benzyloxycarbonyl-Leu-phenylalaninal; γ-secretase inhibitor VI (GSI VI), 1-(S)-endo-N-(1,3,3)-Trimethylbicyclo[2.2.1]hept-2-yl)-4-fluorophenyl Sulfonamide; γ-secretase inhibitor VII (GSI VII), Menthyloxycarbonyl-LL-CHO; γ-secretase inhibitor IX (GSI IX), (DAPT), N-[N-(3,5-Difluorophenacetyl-L-alanyl)]-S-phenylglycine t-Butyl Ester; γ-secretase inhibitor X (GSI X), {1 S-Benzyl-4R-[1-(1S-carbamoyl-2-phenethylcarbamoyl)-1S-3-methylbutylcarbamoyl]-2R-hydroxy-5-phenylpentyl}carbamic Acid tert-butyl Ester; γ-secretase inhibitor XI (GSI XI), 7-Amino-4-chloro-3-methoxyisocoumarin; γ-secretase inhibitor XII (GSI XII), Z-Ile-Leu-CHO; γ-secretase inhibitor XIII (GSI XIII), Z-Tyr-Ile-Leu-CHO; γ-secretase inhibitor XIV (GSI XIV), Z-Cys(t-Bu)-Ile-Leu-CHO; γ-secretase inhibitor XVI (GSI XVI), N-[N-3,5-Difluorophenacetyl]-L-alanyl-S-phenylglycine Methyl Ester; γ-secretase inhibitor XVII (GSI XVII); γ-secretase inhibitor XIX (GSI XIX), benzo[e][1,4]diazepin-3-yl)-butyramide; γ-secretase inhibitor XX (GSI XX), (S,S)-2-[2-(3,5-Difluorophenyl)acetylamino]-N-(5-methyl-6-oxo-6,7-dihydro-5H-dibenzo[b,d]azepin-7-yl)propionamide; γ-secretase inhibitor XXI (GSI XXI), (S,S)-2-[2-(3,5-Difluorophenyl)-acetylamino]-N-(1-methyl-2-oxo-5-phenyl-2-,3-dihydro-IH-benzo[e][1,4]diazepin-3-yl)-propionamide; Gamma40 secretase inhibitor I, N-trans-3,5-Dimethoxycinnamoyl-Ile-leucinal; Gamma40 secretase inhibitor II, N-tert-Butyloxycarbonyl-Gly-Val-Valinal Isovaleryl-V V-Sta-A-Sta-OCH3; MK-0752 (Merck); MRK-003 (Merck); semagacestat/LY450139 (Eli Lilly); RO4929097; PF-03084014; BMS-708163; MPC-7869 (γ-secretase modifier), YO-01027 (Dibenzazepine); LY411575 (Eli Lilly and Co.); L-685458 (Sigma-Aldrich); BMS-289948 (4-chloro-N-(2,5-difluorophenyl)-N-((IR)-{4-fluoro-2-[3-(1H-imidazol-I-yl)propyl]phenyl}ethyl)benzenesulfonamide hydrochloride); or BMS-299897 (4-[2-((IR)-I-{[(4-chlorophenyl)sulfonyl]-2,5-difluoroanilino}ethyl)-5-fluorophenyljbutanoic acid) (Bristol Myers Squibb).

[0766] Exemplary cytokine therapies include interleukin 2 (IL-2) and interferon-alpha (IFN-alpha).

[0767] In certain aspects, “cocktails” of different chemotherapeutic agents are administered as the additional agent(s).

[0768] In some embodiments, the additional agent(s) to be administered in combination with the CD3 binding molecules are one or more standard of care agents or therapies and/or experimental treatments.

[0769] For Hodgkin's lymphoma, combination agents/therapies include radiation and/or chemotherapy (e.g., ABVD (doxorubicin, bleomycin, vinblastine, and dacarbazine), BEACOPP (bleomycin, etoposide, doxorubicin, cyclophosphamide, vincristine, procarbazine and prednisone), or Stanford V (doxorubicin, mechlorethamine (nitrogen mustard), vincristine, vinblastine, bleomycin, etoposide, and prednisone)), antibodies (e.g., brentuximab vedotin, rituximab, or a checkpoint inhibitor such as nivolumab or pembrolizumab).

[0770] For DLBCL, combination agents/therapies include monoclonal antibodies (e.g., rituximab (Rituxan)), chemotherapy and/or radiation.

[0771] For follicular lymphoma, combination agents/therapies include chemotherapy (e.g., bendamustine (Treanda)); monoclonal antibodies (e.g., rituximab), targeted therapies (e.g., lenalidomide (Revlimid)) and/or radiation.

[0772] For mantle cell lymphoma, combination agents/therapies include chemotherapy (including high dose chemotherapy), monoclonal antibodies (e.g., rituximab), targeted therapies (e.g., bortezomib (Velcade), ibrutinib (Imbruvica), and lenalidomide (Revlimid)), stem cell transplants and/or radiation therapy.

[0773] For small lymphocytic lymphoma, combination agents/therapies include chemotherapy, monoclonal antibodies, stem cell transplantation, targeted therapies (e.g., ibrutinib), and/or tumor vaccines.

[0774] For primary mediastinal large B-cell lymphoma and mediastinal grey-zone lymphoma (MGZL), combination agents/therapies include anthracycline-based chemotherapy, rituximab and/or radiation therapy to the chest.

[0775] For splenic marginal zone B-cell lymphoma, combination agents/therapies include the same treatments as follicular lymphoma and additionally in some cases removal of the spleen.

[0776] For extranodal marginal zone B-cell lymphoma of MALT, combination agents/therapies include antibiotics (to treat the often causal infection with Helicobacter pylon), radiation therapy, surgery, chemotherapy, and/or monoclonal antibodies.

[0777] For nodal marginal zone B-cell lymphoma, combination agents/therapies include the same treatments as follicular lymphoma.

[0778] For lymphoplasmacytic lymphoma and the Waldenstrom's macroglobulinemia (WM) variant, combination agents/therapies include those useful for chronic lymphocytic leukemia or follicular lymphoma (see above).

[0779] For primary effusion lymphoma, combination agents/therapies include those useful for other diffuse large-cell lymphomas.

[0780] For Burkitt lymphoma/Burkitt cell leukemia, combination agents/therapies include intensive chemotherapy.

[0781] For multiple myeloma, combination agents/therapies include dexamethasone, pomalidomide (with or without dexamethasone), lenalidomide (with or without dexamethasone), and bortezomib (with or without dexamethasone).

### 8. EXAMPLES

### 8.1. Example 1: Generation of Anti-CD3 Antibodies

[0782] Three week to twenty-week old rats were immunized with recombinant human CD3 protein or peptide by a repetitive procedure involving four injections either subcutaneously or interperitoneally. Spleens of immunized rats were harvested, and isolated splenocytes were fused to myeloma cells (P3Ag8.653 cell line) to create hybridoma clones. Supernatant from hybridoma clones was tested with Mirrorball™ (TTPlabtech) as the primary screening assay to identify positive clones binding to human CD3. Supernatants from positive clones identified from the primary screening binding assay against human CD3 were then tested for the ability to bind cynomolgus monkey CD3. Only clones that were able to bind both human CD3 and cyno CD3 are provided.

[0783] Methods for primatizing or humanizing non-human antibodies are well known in the art. Generally, a primatized or humanized antibody has one or more amino acid residues introduced into it from a source which is non-primate or non-human. Such non-primate or non-human amino acid residues are often referred to as import residues, which are typically taken from an import variable domain. Humanization can be essentially performed following the method of Winter and co-workers (see, e.g., Jones et al., Nature 321:522-525 (1986); Riechmann et al., Nature 332:323-327 (1988); Verhoeyen et al., Science 239:1534-1536 (1988) and Presta, Curr. Op. Struct. Biol. 2:593-596 (1992)), by substituting rodent CDRs or CDR sequences for the corresponding sequences of a human antibody. Accordingly, such humanized antibodies are chimeric antibodies (U.S. Pat. No. 4,816,567), wherein substantially less than an intact human variable domain has been substituted by the corresponding sequence from a non-human species. In practice, primatized or humanized antibodies are typically primate or human antibodies in which some complementary determining region (“CDR”) residues and possibly some framework (“FR”) residues are substituted by residues from analogous sites in an originating species (e.g., rodent antibodies) to confer binding specificity.

[0784] Alternatively or additionally, an in vivo method for replacing a nonhuman antibody variable region with a human variable region in an antibody while maintaining the same or providing better binding characteristics relative to that of the nonhuman antibody may be utilized to convert non-human antibodies into engineered human antibodies. See, e.g., U.S. Patent Publication No. 2005/0008625, U.S. Patent Publication No. 2005/0255552. Alternatively, human V segment libraries can be generated by sequential cassette replacement in which only part of the reference antibody V segment is initially replaced by a library of human sequences; and identified human “cassettes” supporting binding in the context of residual reference antibody amino acid sequences are then recombined in a second library screen to generate completely human V segments (see, U.S. Patent Publication No. 2006/0134098).

TABLE 19
CD3 binding Sequences

| | | |
|---|---|---|
| NOV292 HC | | |
| SEQ ID NO: 133 | HCDR1 | GFTFSKNGMH |
| (Combined) | | |
| SEQ ID NO: 134 | HCDR2 | MIYYDSSKMYYADTVKG |
| (Combined) | | |
| SEQ ID NO: 135 | HCDR3 | FVWVDLDFDH |
| (Combined) | | |
| SEQ ID NO: 136 | HCDR1 | KNGMH |
| (Kabat) | | |
| SEQ ID NO: 137 | HCDR2 | MIYYDSSKMYYADTVKG |
| (Kabat) | | |
| SEQ ID NO: 138 | HCDR3 | FVWVDLDFDH |
| (Kabat) | | |
| SEQ ID NO: 139 | HCDR1 | GFTFSKN |
| (Chothia) | | |
| SEQ ID NO: 140 | HCDR2 | YYDSSK |
| (Chothia) | | |
| SEQ ID NO: 141 | HCDR3 | FVWVDLDFDH |
| (Chothia) | | |
| SEQ ID NO: 142 | HCDR1 | GFTFSKNG |
| (IMGT) | | |
| SEQ ID NO: 143 | HCDR2 | IYYDSSKM |
| (IMGT) | | |
| SEQ ID NO: 144 | HCDR3 | ASFVWVDLDFDH |
| (IMGT) | | |
| SEQ ID NO: 145 | VH | QVQLVESGGGVVQPGRSLRLSCAASGFTFSKNGMHVVVRQAPGK |
| | | GLEWVAMIYYDSSKMYYADTVKGRFTISRDNSKNTLYLQMNSLRA |
| | | EDTAVYYCASFVWVDLDFDHWGQGTMVTVSS |
| SEQ ID NO: 146 | DNA VH | CAGGTGCAGCTGGTGGAGTCTGGAGGAGGAGTGGTGCAGCCA |
| | | GGCCGGTCCCTGAGACTGTCTTGCGCCGCCAGCGGCTTCACC |
| | | TTTAGCAAGAACGGAATGCACTGGGTGCGGCAGGCACCTGGC |
| | | AAGGGACTGGAGTGGGTGGCCATGATCTACTATGATAGCTCCA |
| | | AGATGTACTATGCCGACACCGTGAAGGGCAGGTTCACAATCTC |
| | | CCGCGATAACTCTAAGAATACCCTGTACCTGCAGATGAATAGC |
| | | CTGAGGGCCGAGGACACAGCCGTGTACTATTGTGCCTCCTTCT |
| | | GGTGGGACCTGGATTTTGACCACTGGGGCCAGGGCACCATGG |
| | | TGACAGTGTCTAGC |
| SEQ ID NO: 147 | Heavy | QVQLVESGGGVVQPGRSLRLSCAASGFTFSKNGMHWVRQAPGK |
| | Chain | GLEWVAMIYYDSSKMYYADTVKGRFTISRDNSKNTLYLQMNSLRA |
| | | EDTAVYYCASFVWVDLDFDHWGQGTMVTVSSASTKGPSVFPLAP |
| | | SSKSTSGGTAALGCLVKDYFPEPVTVSVVNSGALTSGVHTFPAVLQ |
| | | SSGLYSLSSVVTVPSSSLGTQTYICNVNHKPSNTKVDKRVEPKSC |
| | | DKTHTCPPCPAPEAAGGPSVFLFPPKPKDTLMISRTPEVTCVVVD |
| | | VSHEDPEVKFNWYVDGVEVHNAKTKPREEQYNSTYRVVSVLTVL |
| | | HQDWLNGKEYKCKVSNKALPAPIEKTISKAKGQPREPQVYTLPPS |
| | | REEMTKNQVSLTCLVKGFYPSDIAVEVVESNGQPENNYKTTPPVLD |
| | | SDGSFFLYSKLTVDKSRWQQGNVFSCSVMHEALHNHYTQKSLSL |
| | | SPGK |
| SEQ ID NO: 148 | DNA | CAGGTGCAGCTGGTGGAGTCTGGAGGAGGAGTGGTGCAGCCA |
| | Heavy | GGCCGGTCCCTGAGACTGTCTTGCGCCGCCAGCGGCTTCACC |
| | Chain | TTTAGCAAGAACGGAATGCACTGGGTGCGGCAGGCACCTGGC |
| | | AAGGGACTGGAGTGGGTGGCCATGATCTACTATGATAGCTCCA |
| | | AGATGTACTATGCCGACACCGTGAAGGGCAGGTTCACAATCTC |
| | | CCGCGATAACTCTAAGAATACCCTGTACCTGCAGATGAATAGC |
| | | CTGAGGGCCGAGGACACAGCCGTGTACTATTGTGCCTCCTTCT |
| | | GGTGGGACCTGGATTTTGACCACTGGGGCCAGGGCACCATGG |
| | | TGACAGTGTCTAGCGCTAGCACCAAGGGCCCATCGGTCTTCCC |
| | | CCTGGCACCCTCCTCCAAGAGCACCTCTGGGGGCACAGCGGC |
| | | CCTGGGCTGCCTGGTCAAGGACTACTTCCCCGAACCGGTGAC |
| | | GGTGTCGTGGAACTCAGGCGCCCTGACCAGCGGCGTGCACAC |
| | | CTTCCCGGCTGTCCTACAGTCCTCAGGACTCTACTCCCTCAGC |
| | | AGCGTGGTGACCGTGCCCTCCAGCAGCTTGGGCACCCAGACC |
| | | TACATCTGCAACGTGAATCACAAGCCCAGCAACACCAAGGTGG |
| | | ACAAGAGAGTTGAGCCCAAATCTTGTGACAAAACTCACACATGC |
| | | CCACCGTGCCCAGCACCTGAAGCCGCTGGGGGACCGTCAGTC |
| | | TTCCTCTTCCCCCCAAAACCCAAGGACACCCTCATGATCTCCC |
| | | GGACCCCTGAGGTCACATGCGTGGTGGTGGACGTGAGCCACG |
| | | AAGACCCTGAGGTCAAGTTCAACTGGTACGTGGACGGCGTGGA |
| | | GGTGCATAATGCCAAGACAAAGCCGCGGGAGGAGCAGTACAA |
| | | CAGCACGTACCGTGTGGTCAGCGTCCTCACCGTCCTGCACCAG |
| | | GACTGGCTGAATGGCAAGGAGTACAAGTGCAAGGTCTCCAACA |
| | | AAGCCCTCCCAGCCCCCATCGAGAAAACCATCTCCAAAGCCAA |
| | | AGGGCAGCCCCGAGAACCACAGGTGTACACCCTGCCCCCATC |
| | | CCGGGAGGAGATGACCAAGAACCAGGTCAGCCTGACCTGCCT |
| | | GGTCAAAGGCTTCTATCCCAGCGACATCGCCGTGGAGTGGGA |
| | | GAGCAATGGGCAGCCGGAGAACAACTACAAGACCACGCCTCC |
| | | CGTGCTGGACTCCGACGGCTCCTTCTTCCTCTACAGCAAGCTC |
| | | ACCGTGGACAAGAGCAGGTGGCAGCAGGGGAACGTCTTCTCA |
| | | TGCTCCGTGATGCATGAGGCTCTGCACAACCACTACACGCAGA |
| | | AGAGCCTCTCCCTGTCTCCGGGTAAA |
| NOV292 LC | | |
| SEQ ID NO: 149 | LCDR1 | RSSQSLVRSDGTTYFN |
| (Combined) | | |
| SEQ ID NO: 150 | LCDR2 | RVSNRFS |
| (Combined) | | |
| SEQ ID NO: 151 | LCDR3 | LQSSHFPVVT |
| (Combined) | | |
| SEQ ID NO: 152 | LCDR1 | RSSQSLVRSDGTTYFN |
| (Kabat) | | |
| SEQ ID NO: 153 | LCDR2 | RVSNRFS |
| (Kabat) | | |
| SEQ ID NO: 154 | LCDR3 | LQSSHFPWT |
| (Kabat) | | |
| SEQ ID NO: 155 | LCDR1 | SQSLVRSDGTTY |
| (Chothia) | | |
| SEQ ID NO: 156 | LCDR2 | RVS |
| (Chothia) | | |
| SEQ ID NO: 157 | LCDR3 | SSHFPW |
| (Chothia) | | |
| SEQ ID NO: 158 | LCDR1 | QSLVRSDGTTY |
| (IMGT) | | |
| SEQ ID NO: 159 | LCDR2 | RVS |
| (IMGT) | | |
| SEQ ID NO: 160 | LCDR3 | LQSSHFPVVT |
| (IMGT) | | |
| SEQ ID NO: 161 | VL | DIVMTQTPLSSPVTLGQPASISCRSSQSLVRSDGTTYFNWYQQRP |
| | | GQPPRLLIYRVSNRFSGVPDRFSGSGAGTDFTLKISRVEAEDVGV |
| | | YYCLQSSHFPVVTFGGGTKVEIK |
| SEQ ID NO: 162 | DNA VL | GACATCGTGATGACCCAGACACCACTGAGCTCCCCAGTGACCC |
| | | TGGGACAGCCAGCCAGCATCTCCTGCCGGTCTAGCCAGTCCCT |
| | | GGTGAGATCTGATGGCACCACATACTTCAACTGGTATCAGCAG |
| | | AGGCCTGGACAGCCACCTAGGCTGCTGATCTACCGGGTGAGC |
| | | AATAGATTCTCCGGCGTGCCAGACAGGTTTTCTGGCAGCGGAG |
| | | CAGGAACCGACTTCACCCTGAAGATCTCTAGAGTGGAGGCCGA |
| | | GGACGTGGGCGTGTACTATTGTCTGCAGTCCTCTCACTTCCCT |
| | | TGGACCTTTGGCGGCGGCACAAAGGTGGAGATCAAG |
| SEQ ID NO: 163 | Light | DIVMTQTPLSSPVTLGQPASISCRSSQSLVRSDGTTYFNWYQQRP |
| | chain | GQPPRLLIYRVSNRFSGVPDRFSGSGAGTDFTLKISRVEAEDVGV |
| | | YYCLQSSHFPVVTFGGGTKVEIKRTVAAPSVFIFPPSDEQLKSGTAS |
| | | VVCLLNNFYPREAKVQVVKVDNALQSGNSQESVTEQDSKDSTYSL |
| | | SSTLTLSKADYEKHKVYACEVTHQGLSSPVTKSFNRGEC |
| SEQ ID NO: 164 | DNA | GACATCGTGATGACCCAGACACCACTGAGCTCCCCAGTGACCC |
| | Light | TGGGACAGCCAGCCAGCATCTCCTGCCGGTCTAGCCAGTCCCT |
| | Chain | GGTGAGATCTGATGGCACCACATACTTCAACTGGTATCAGCAG |
| | | AGGCCTGGACAGCCACCTAGGCTGCTGATCTACCGGGTGAGC |
| | | AATAGATTCTCCGGCGTGCCAGACAGGTTTTCTGGCAGCGGAG |
| | | CAGGAACCGACTTCACCCTGAAGATCTCTAGAGTGGAGGCCGA |
| | | GGACGTGGGCGTGTACTATTGTCTGCAGTCCTCTCACTTCCCT |
| | | TGGACCTTTGGCGGCGGCACAAAGGTGGAGATCAAGCGTACG |
| | | GTGGCTGCACCATCTGTCTTCATCTTCCCGCCATCTGATGAGC |
| | | AGTTGAAATCTGGAACTGCCTCTGTTGTGTGCCTGCTGAATAAC |
| | | TTCTATCCCCGCGAGGCCAAAGTACAGTGGAAGGTGGATAACG |
| | | CCCTCCAATCGGGTAACTCCCAGGAGAGTGTCACAGAGCAGGA |
| | | CAGCAAGGACAGCACCTACAGCCTCAGCAGCACCCTGACGCT |
| | | GAGCAAAGCAGACTACGAGAAACACAAAGTCTACGCCTGCGAA |
| | | GTCACCCATCAGGGCCTGAGCTCGCCCGTCACAAAGAGCTTCA |
| | | ACCGCGGAGAGTGT |
| NOV123 HC | | |
| SEQ ID NO: 165 | HCDR1 | GYTFTSYYIY |
| (Combined) | | |
| SEQ ID NO: 166 | HCDR2 | YIYPGHDAIYYSENFKG |
| (Combined) | | |
| SEQ ID NO: 167 | HCDR3 | PNTMMAPLAY |
| (Combined) | | |
| SEQ ID NO: 168 | HCDR1 | SYYIY |
| (Kabat) | | |
| SEQ ID NO: 169 | HCDR2 | YIYPGHDAIYYSENFKG |
| (Kabat) | | |
| SEQ ID NO: 170 | HCDR3 | PNTMMAPLAY |
| (Kabat) | | |
| SEQ ID NO: 171 | HCDR1 | GYTFTSY |
| (Chothia) | | |
| SEQ ID NO: 172 | HCDR2 | YPGHDA |
| (Chothia) | | |
| SEQ ID NO: 173 | HCDR3 | PNTMMAPLAY |
| (Chothia) | | |
| SEQ ID NO: 174 | HCDR1 | GYTFTSYY |
| (IMGT) | | |
| SEQ ID NO: 175 | HCDR2 | IYPGHDAI |
| (IMGT) | | |
| SEQ ID NO: 176 | HCDR3 | VRPNTMMAPLAY |
| (IMGT) | | |
| SEQ ID NO: 177 | VH | QVQLVQSGAEVKKPGASVKVSCKASGYTFTSYYIYWVRQAPGQR |
| | | LEWMGYIYPGHDAIYYSENFKGRVTITADTSASTAYMELSSLRSED |
| | | TAVYYCVRPNTMMAPLAYWGQGTLVTVSS |
| SEQ ID NO: 178 | DNA VH | CAGGTGCAGCTGGTGCAGAGCGGAGCAGAGGTGAAGAAGCCA |
| | | GGAGCCAGCGTGAAGGTGTCCTGCAAGGCCTCTGGCTACACC |
| | | TTCACATCCTACTATATCTATTGGGTGCGGCAGGCACCAGGAC |
| | | AGAGACTGGAGTGGATGGGCTACATCTATCCCGGCCACGACG |
| | | CCATCTACTATTCTGAGAACTTTAAGGGCCGGGTGACCATCACA |
| | | GCCGATACCTCCGCCTCTACAGCCTACATGGAGCTGAGCTCCC |
| | | TGAGGAGCGAGGACACCGCCGTGTACTATTGCGTGCGGCCCA |
| | | ATACAATGATGGCACCTCTGGCCTATTGGGGACAGGGCACCCT |
| | | GGTGACAGTGTCTAGC |
| SEQ ID NO: 179 | Heavy | QVQLVQSGAEVKKPGASVKVSCKASGYTFTSYYIYWVRQAPGQR |
| | Chain | LEWMGYIYPGHDAIYYSENFKGRVTITADTSASTAYMELSSLRSED |
| | | TAVYYCVRPNTMMAPLAYWGQGTLVTVSSASTKGPSVFPLAPSS |
| | | KSTSGGTAALGCLVKDYFPEPVTVSVVNSGALTSGVHTFPAVLQSS |
| | | GLYSLSSVVTVPSSSLGTQTYICNVNHKPSNTKVDKRVEPKSCDK |
| | | THTCPPCPAPEAAGGPSVFLFPPKPKDTLMISRTPEVTCVVVDVS |
| | | HEDPEVKFNWYVDGVEVHNAKTKPREEQYNSTYRVVSVLTVLHQ |
| | | DWLNGKEYKCKVSNKALPAPIEKTISKAKGQPREPQVYTLPPSRE |
| | | EMTKNQVSLTCLVKGFYPSDIAVEVVESNGQPENNYKTTPPVLDSD |
| | | GSFFLYSKLTVDKSRWQQGNVFSCSVMHEALHNHYTQKSLSLSP |
| | | GK |
| SEQ ID NO: 180 | DNA | CAGGTGCAGCTGGTGCAGAGCGGAGCAGAGGTGAAGAAGCC |
| | Heavy | AGGAGCCAGCGTGAAGGTGTCCTGCAAGGCCTCTGGCTACAC |
| | Chain | CTTCACATCCTACTATATCTATTGGGTGCGGCAGGCACCAGGA |
| | | CAGAGACTGGAGTGGATGGGCTACATCTATCCCGGCCACGAC |
| | | GCCATCTACTATTCTGAGAACTTTAAGGGCCGGGTGACCATCA |
| | | CAGCCGATACCTCCGCCTCTACAGCCTACATGGAGCTGAGCTC |
| | | CCTGAGGAGCGAGGACACCGCCGTGTACTATTGCGTGCGGCC |
| | | CAATACAATGATGGCACCTCTGGCCTATTGGGGACAGGGCACC |
| | | CTGGTGACAGTGTCTAGCGCTAGCACCAAGGGCCCATCGGTCT |
| | | TCCCCCTGGCACCCTCCTCCAAGAGCACCTCTGGGGGCACAG |
| | | CGGCCCTGGGCTGCCTGGTCAAGGACTACTTCCCCGAACCGG |
| | | TGACGGTGTCGTGGAACTCAGGCGCCCTGACCAGCGGCGTGC |
| | | ACACCTTCCCGGCTGTCCTACAGTCCTCAGGACTCTACTCCCT |
| | | CAGCAGCGTGGTGACCGTGCCCTCCAGCAGCTTGGGCACCCA |
| | | GACCTACATCTGCAACGTGAATCACAAGCCCAGCAACACCAAG |
| | | GTGGACAAGAGAGTTGAGCCCAAATCTTGTGACAAAACTCACA |
| | | CATGCCCACCGTGCCCAGCACCTGAAGCCGCTGGGGGACCGT |
| | | CAGTCTTCCTCTTCCCCCCAAAACCCAAGGACACCCTCATGATC |
| | | TCCCGGACCCCTGAGGTCACATGCGTGGTGGTGGACGTGAGC |
| | | CACGAAGACCCTGAGGTCAAGTTCAACTGGTACGTGGACGGC |
| | | GTGGAGGTGCATAATGCCAAGACAAAGCCGCGGGAGGAGCAG |
| | | TACAACAGCACGTACCGTGTGGTCAGCGTCCTCACCGTCCTGC |
| | | ACCAGGACTGGCTGAATGGCAAGGAGTACAAGTGCAAGGTCTC |
| | | CAACAAAGCCCTCCCAGCCCCCATCGAGAAAACCATCTCCAAA |
| | | GCCAAAGGGCAGCCCCGAGAACCACAGGTGTACACCCTGCCC |
| | | CCATCCCGGGAGGAGATGACCAAGAACCAGGTCAGCCTGACC |
| | | TGCCTGGTCAAAGGCTTCTATCCCAGCGACATCGCCGTGGAGT |
| | | GGGAGAGCAATGGGCAGCCGGAGAACAACTACAAGACCACGC |
| | | CTCCCGTGCTGGACTCCGACGGCTCCTTCTTCCTCTACAGCAA |
| | | GCTCACCGTGGACAAGAGCAGGTGGCAGCAGGGGAACGTCTT |
| | | CTCATGCTCCGTGATGCATGAGGCTCTGCACAACCACTACACG |
| | | CAGAAGAGCCTCTCCCTGTCTCCGGGTAAA |
| NOV123 LC | | |
| SEQ ID NO: 181 | LCDR1 | RSSQSLIYSIGNTYLH |
| (Combined) | | |
| SEQ ID NO: 182 | LCDR2 | RVSNRFS |
| (Combined) | | |
| SEQ ID NO: 183 | LCDR3 | FQSTHLPYT |
| (Combined) | | |
| SEQ ID NO: 184 | LCDR1 | RSSQSLIYSIGNTYLH |
| (Kabat) | | |
| SEQ ID NO: 185 | LCDR2 | RVSNRFS |
| (Kabat) | | |
| SEQ ID NO: 186 | LCDR3 | FQSTHLPYT |
| (Kabat) | | |
| SEQ ID NO: 187 | LCDR1 | SQSLIYSIGNTY |
| (Chothia) | | |
| SEQ ID NO: 188 | LCDR2 | RVS |
| (Chothia) | | |
| SEQ ID NO: 189 | LCDR3 | STHLPY |
| (Chothia) | | |
| SEQ ID NO: 190 | LCDR1 | QSLIYSIGNTY |
| (IMGT) | | |
| SEQ ID NO: 191 | LCDR2 | RVS |
| (IMGT) | | |
| SEQ ID NO: 192 | LCDR3 | FQSTHLPYT |
| (IMGT) | | |
| SEQ ID NO: 193 | VL | DVVMTQSPLSLPVTLGQPASISCRSSQSLIYSIGNTYLHWYQQRP |
| | | GQSPRLLIYRVSNRFSGVPDRFSGSGSGTDFTLKISRVEAEDVGV |
| | | YYCFQSTHLPYTFGQGTKLEIK |
| SEQ ID NO: 194 | DNA VL | GACGTGGTCATGACACAGTCCCCACTGTCTCTGCCTGTGACCC |
| | | TGGGACAGCCAGCCTCTATCAGCTGCCGGAGCTCCCAGAGCC |
| | | TGATCTACTCCATCGGCAACACATACCTGCACTGGTATCAGCA |
| | | GAGGCCAGGACAGTCCCCAAGGCTGCTGATCTATCGGGTGTCT |
| | | AATAGATTCAGCGGCGTGCCTGACCGGTTTTCCGGCTCTGGCA |
| | | GCGGCACCGATTTCACACTGAAGATCTCCAGGGTGGAGGCCG |
| | | AGGATGTGGGCGTGTACTATTGTTTCCAGTCTACCCACCTGCC |
| | | ATACACATTTGGCCAGGGCACCAAGCTGGAGATCAAG |
| SEQ ID NO: 195 | Light | DVVMTQSPLSLPVTLGQPASISCRSSQSLIYSIGNTYLHWYQQRP |
| | chain | GQSPRLLIYRVSNRFSGVPDRFSGSGSGTDFTLKISRVEAEDVGV |
| | | YYCFQSTHLPYTFGQGTKLEIKRTVAAPSVFIFPPSDEQLKSGTAS |
| | | VVCLLNNFYPREAKVQWKVDNALQSGNSQESVTEQDSKDSTYSL |
| | | SSTLTLSKADYEKHKVYACEVTHQGLSSPVTKSFNRGEC |
| SEQ ID NO: 196 | DNA | GACGTGGTCATGACACAGTCCCCACTGTCTCTGCCTGTGACCC |
| | Light | TGGGACAGCCAGCCTCTATCAGCTGCCGGAGCTCCCAGAGCC |
| | Chain | TGATCTACTCCATCGGCAACACATACCTGCACTGGTATCAGCA |
| | | GAGGCCAGGACAGTCCCCAAGGCTGCTGATCTATCGGGTGTCT |
| | | AATAGATTCAGCGGCGTGCCTGACCGGTTTTCCGGCTCTGGCA |
| | | GCGGCACCGATTTCACACTGAAGATCTCCAGGGTGGAGGCCG |
| | | AGGATGTGGGCGTGTACTATTGTTTCCAGTCTACCCACCTGCC |
| | | ATACACATTTGGCCAGGGCACCAAGCTGGAGATCAAGCGTACG |
| | | GTGGCTGCACCATCTGTCTTCATCTTCCCGCCATCTGATGAGC |
| | | AGTTGAAATCTGGAACTGCCTCTGTTGTGTGCCTGCTGAATAAC |
| | | TTCTATCCCCGCGAGGCCAAAGTACAGTGGAAGGTGGATAACG |
| | | CCCTCCAATCGGGTAACTCCCAGGAGAGTGTCACAGAGCAGGA |
| | | CAGCAAGGACAGCACCTACAGCCTCAGCAGCACCCTGACGCT |
| | | GAGCAAAGCAGACTACGAGAAACACAAAGTCTACGCCTGCGAA |
| | | GTCACCCATCAGGGCCTGAGCTCGCCCGTCACAAAGAGCTTCA |
| | | ACCGCGGAGAGTGT |
| NOV453 HC | | |
| SEQ ID NO: 197 | HCDR1 | GFSLTTYNVH |
| (Combined) | | |
| SEQ ID NO: 198 | HCDR2 | RMRYSGDTSFNAALTS |
| (Combined) | | |
| SEQ ID NO: 199 | HCDR3 | DPMYIPNYSYGVMNA |
| (Combined) | | |
| SEQ ID NO: 200 | HCDR1 | TYNVH |
| (Kabat) | | |
| SEQ ID NO: 201 | HCDR2 | RMRYSGDTSFNAALTS |
| (Kabat) | | |
| SEQ ID NO: 202 | HCDR3 | DPMYIPNYSYGVMNA |
| (Kabat) | | |
| SEQ ID NO: 203 | HCDR1 | GFSLTTY |
| (Chothia) | | |
| SEQ ID NO: 204 | HCDR2 | RYSGD |
| (Chothia) | | |
| SEQ ID NO: 205 | HCDR3 | DPMYIPNYSYGVMNA |
| (Chothia) | | |
| SEQ ID NO: 206 | HCDR1 | GFSLTTYN |
| (IMGT) | | |
| SEQ ID NO: 207 | HCDR2 | MRYSGDT |
| (IMGT) | | |
| SEQ ID NO: 208 | HCDR3 | TSDPMYIPNYSYGVMNA |
| (IMGT) | | |
| SEQ ID NO: 209 | VH | QVQLQESGPGLVKPSETLSLTCTVSGFSLTTYNVHWIRQPPGKGL |
| | | EWIGRMRYSGDTSFNAALTSRVTISRDTSKNQVSLKLSSVTAADT |
| | | AVYYCTSDPMYIPNYSYGVMNAWGQGTTVTVSS |
| SEQ ID NO: 210 | DNA VH | CAGGTGCAGCTGCAGGAGAGCGGACCTGGACTGGTGAAGCCA |
| | | AGCGAGACCCTGTCCCTGACCTGCACAGTGTCCGGCTTCTCTC |
| | | TGACCACATACAACGTGCACTGGATCAGACAGCCACCTGGCAA |
| | | GGGACTGGAGTGGATCGGCCGGATGAGATATTCTGGCGACAC |
| | | CAGCTTTAACGCCGCCCTGACCTCTAGGGTGACAATCTCCCGC |
| | | GATACATCTAAGAATCAGGTGTCCCTGAAGCTGAGCTCCGTGA |
| | | CCGCAGCAGACACAGCCGTGTACTATTGTACCAGCGATCCAAT |
| | | GTACATCCCCAACTACTCCTATGGCGTGATGAATGCCTGGGGC |
| | | CAGGGCACCACAGTGACAGTGTCTAGC |
| SEQ ID NO: 211 | Heavy | QVQLQESGPGLVKPSETLSLTCTVSGFSLTTYNVHWIRQPPGKGL |
| | Chain | EWIGRMRYSGDTSFNAALTSRVTISRDTSKNQVSLKLSSVTAADT |
| | | AVYYCTSDPMYIPNYSYGVMNAWGQGTTVTVSSASTKGPSVFPL |
| | | APSSKSTSGGTAALGCLVKDYFPEPVTVSWNSGALTSGVHTFPAV |
| | | LQSSGLYSLSSVVTVPSSSLGTQTYICNVNHKPSNTKVDKRVEPK |
| | | SCDKTHTCPPCPAPEAAGGPSVFLFPPKPKDTLMISRTPEVTCVV |
| | | VDVSHEDPEVKFNWYVDGVEVHNAKTKPREEQYNSTYRVVSVLT |
| | | VLHQDWLNGKEYKCKVSNKALPAPIEKTISKAKGQPREPQVYTLP |
| | | PSREEMTKNQVSLTCLVKGFYPSDIAVEWESNGQPENNYKTTPPV |
| | | LDSDGSFFLYSKLTVDKSRWQQGNVFSCSVMHEALHNHYTQKSL |
| | | SLSPGK |
| SEQ ID NO: 212 | DNA | CAGGTGCAGCTGCAGGAGAGCGGACCTGGACTGGTGAAGCC |
| | Heavy | AAGCGAGACCCTGTCCCTGACCTGCACAGTGTCCGGCTTCTCT |
| | Chain | CTGACCACATACAACGTGCACTGGATCAGACAGCCACCTGGCA |
| | | AGGGACTGGAGTGGATCGGCCGGATGAGATATTCTGGCGACA |
| | | CCAGCTTTAACGCCGCCCTGACCTCTAGGGTGACAATCTCCCG |
| | | CGATACATCTAAGAATCAGGTGTCCCTGAAGCTGAGCTCCGTG |
| | | ACCGCAGCAGACACAGCCGTGTACTATTGTACCAGCGATCCAA |
| | | TGTACATCCCCAACTACTCCTATGGCGTGATGAATGCCTGGGG |
| | | CCAGGGCACCACAGTGACAGTGTCTAGCGCTAGCACCAAGGG |
| | | CCCATCGGTCTTCCCCCTGGCACCCTCCTCCAAGAGCACCTCT |
| | | GGGGGCACAGCGGCCCTGGGCTGCCTGGTCAAGGACTACTTC |
| | | CCCGAACCGGTGACGGTGTCGTGGAACTCAGGCGCCCTGACC |
| | | AGCGGCGTGCACACCTTCCCGGCTGTCCTACAGTCCTCAGGAC |
| | | TCTACTCCCTCAGCAGCGTGGTGACCGTGCCCTCCAGCAGCTT |
| | | GGGCACCCAGACCTACATCTGCAACGTGAATCACAAGCCCAGC |
| | | AACACCAAGGTGGACAAGAGAGTTGAGCCCAAATCTTGTGACA |
| | | AAACTCACACATGCCCACCGTGCCCAGCACCTGAAGCCGCTGG |
| | | GGGACCGTCAGTCTTCCTCTTCCCCCCAAAACCCAAGGACACC |
| | | CTCATGATCTCCCGGACCCCTGAGGTCACATGCGTGGTGGTGG |
| | | ACGTGAGCCACGAAGACCCTGAGGTCAAGTTCAACTGGTACGT |
| | | GGACGGCGTGGAGGTGCATAATGCCAAGACAAAGCCGCGGGA |
| | | GGAGCAGTACAACAGCACGTACCGTGTGGTCAGCGTCCTCACC |
| | | GTCCTGCACCAGGACTGGCTGAATGGCAAGGAGTACAAGTGCA |
| | | AGGTCTCCAACAAAGCCCTCCCAGCCCCCATCGAGAAAACCAT |
| | | CTCCAAAGCCAAAGGGCAGCCCCGAGAACCACAGGTGTACAC |
| | | CCTGCCCCCATCCCGGGAGGAGATGACCAAGAACCAGGTCAG |
| | | CCTGACCTGCCTGGTCAAAGGCTTCTATCCCAGCGACATCGCC |
| | | GTGGAGTGGGAGAGCAATGGGCAGCCGGAGAACAACTACAAG |
| | | ACCACGCCTCCCGTGCTGGACTCCGACGGCTCCTTCTTCCTCT |
| | | ACAGCAAGCTCACCGTGGACAAGAGCAGGTGGCAGCAGGGGA |
| | | ACGTCTTCTCATGCTCCGTGATGCATGAGGCTCTGCACAACCA |
| | | CTACACGCAGAAGAGCCTCTCCCTGTCTCCGGGTAAA |
| NOV453 LC | | |
| SEQ ID NO: 213 | LCDR1 | KASQNINNYLN |
| (Combined) | | |
| SEQ ID NO: 214 | LCDR2 | NTDHLQA |
| (Combined) | | |
| SEQ ID NO: 215 | LCDR3 | LQHRSRYT |
| (Combined) | | |
| SEQ ID NO: 216 | LCDR1 | KASQNINNYLN |
| (Kabat) | | |
| SEQ ID NO: 217 | LCDR2 | NTDHLQA |
| (Kabat) | | |
| SEQ ID NO: 218 | LCDR3 | LQHRSRYT |
| (Kabat) | | |
| SEQ ID NO: 219 | LCDR1 | SQNINNY |
| (Chothia) | | |
| SEQ ID NO: 220 | LCDR2 | NTD |
| (Chothia) | | |
| SEQ ID NO: 221 | LCDR3 | HRSRY |
| (Chothia) | | |
| SEQ ID NO: 222 | LCDR1 | QNINNY |
| (IMGT) | | |
| SEQ ID NO: 223 | LCDR2 | NTDHLQAGVP |
| (IMGT) | | |
| SEQ ID NO: 224 | LCDR3 | LQHRSRYT |
| (IMGT) | | |
| SEQ ID NO: 225 | VL | DIQMTQSPSSLSASVGDRVTITCKASQNINNYLNWYQQKPGKAPK |
| | | LLIYNTDHLQAGVPSRFSGSGSGTDYTLTISSLQPEDFATYFCLQH |
| | | RSRYTFGPGTKVDIK |
| SEQ ID NO: 226 | DNA VL | GACATCCAGATGACCCAGAGCCCTAGCTCCCTGTCCGCCTCTG |
| | | TGGGCGATAGGGTGACCATCACATGCAAGGCCTCCCAGAACAT |
| | | CAACAATTACCTGAATTGGTATCAGCAGAAGCCCGGCAAGGCC |
| | | CCTAAGCTGCTGATCTACAACACAGACCACCTGCAGGCAGGAG |
| | | TGCCATCTCGGTTCAGCGGCTCCGGCTCTGGAACCGACTATAC |
| | | CCTGACAATCTCTAGCCTGCAGCCAGAGGATTTCGCCACATAC |
| | | TTTTGTCTGCAGCACCGGAGCAGATATACCTTTGGCCCCGGCA |
| | | CAAAGGTGGATA |
| SEQ ID NO: 227 | Light | DIQMTQSPSSLSASVGDRVTITCKASQNINNYLNWYQQKPGKAPK |
| | chain | LLIYNTDHLQAGVPSRFSGSGSGTDYTLTISSLQPEDFATYFCLQH |
| | | RSRYTFGPGTKVDIKRTVAAPSVFIFPPSDEQLKSGTASVVCLLNN |
| | | FYPREAKVQWKVDNALQSGNSQESVTEQDSKDSTYSLSSTLTLS |
| | | KADYEKHKVYACEVTHQGLSSPVTKSFNRGEC |
| SEQ ID NO: 228 | DNA | GACATCCAGATGACCCAGAGCCCTAGCTCCCTGTCCGCCTCTG |
| | Light | TGGGCGATAGGGTGACCATCACATGCAAGGCCTCCCAGAACAT |
| | Chain | CAACAATTACCTGAATTGGTATCAGCAGAAGCCCGGCAAGGCC |
| | | CCTAAGCTGCTGATCTACAACACAGACCACCTGCAGGCAGGAG |
| | | TGCCATCTCGGTTCAGCGGCTCCGGCTCTGGAACCGACTATAC |
| | | CCTGACAATCTCTAGCCTGCAGCCAGAGGATTTCGCCACATAC |
| | | TTTTGTCTGCAGCACCGGAGCAGATATACCTTTGGCCCCGGCA |
| | | CAAAGGTGGATACGTACGGTGGCTGCACCATCTGTCTTCATCT |
| | | TCCCGCCATCTGATGAGCAGTTGAAATCTGGAACTGCCTCTGTT |
| | | GTGTGCCTGCTGAATAACTTCTATCCCCGCGAGGCCAAAGTAC |
| | | AGTGGAAGGTGGATAACGCCCTCCAATCGGGTAACTCCCAGGA |
| | | GAGTGTCACAGAGCAGGACAGCAAGGACAGCACCTACAGCCT |
| | | CAGCAGCACCCTGACGCTGAGCAAAGCAGACTACGAGAAACAC |
| | | AAAGTCTACGCCTGCGAAGTCACCCATCAGGGCCTGAGCTCGC |
| | | CCGTCACAAAGAGCTTCAACCGCGGAGAGTGT |
| NOV229 HC | | |
| SEQ ID NO: 229 | HCDR1 | GFSLTTYNVH |
| (Combined) | | |
| SEQ ID NO: 230 | HCDR2 | RMRYSGDTSFNAALTS |
| (Combined) | | |
| SEQ ID NO: 231 | HCDR3 | DPMYIPNYSYGVMNA |
| (Combined) | | |
| SEQ ID NO: 232 | HCDR1 | TYNVH |
| (Kabat) | | |
| SEQ ID NO: 233 | HCDR2 | RMRYSGDTSFNAALTS |
| (Kabat) | | |
| SEQ ID NO: 234 | HCDR3 | DPMYIPNYSYGVMNA |
| (Kabat) | | |
| SEQ ID NO: 235 | HCDR1 | GFSLTTY |
| (Chothia) | | |
| SEQ ID NO: 236 | HCDR2 | RYSGD |
| (Chothia) | | |
| SEQ ID NO: 237 | HCDR3 | DPMYIPNYSYGVMNA |
| (Chothia) | | |
| SEQ ID NO: 238 | HCDR1 | GFSLTTYN |
| (IMGT) | | |
| SEQ ID NO: 239 | HCDR2 | MRYSGDT |
| (IMGT) | | |
| SEQ ID NO: 240 | HCDR3 | ARDPMYIPNYSYGVMNA |
| (IMGT) | | |
| SEQ ID NO: 241 | VH | QVQLQESGPGLVKPSETLSLTCTVSGFSLTTYNVHWIRQPPGKGL |
| | | EWIGRMRYSGDTSFNAALTSRVTISVDTSKNQFSLKLSSVTAADTA |
| | | VYYCARDPMYIPNYSYGVMNAWGQGTTVTVSS |
| SEQ ID NO: 242 | DNA VH | CAGGTGCAGCTGCAGGAGTCTGGACCTGGACTGGTGAAGCCA |
| | | AGCGAGACCCTGTCCCTGACCTGCACAGTGTCCGGCTTCTCTC |
| | | TGACCACATACAACGTGCACTGGATCAGGCAGCCACCTGGCAA |
| | | GGGACTGGAGTGGATCGGCCGGATGAGATATTCTGGCGACAC |
| | | CAGCTTCAACGCCGCCCTGACCAGCAGGGTGACAATCTCCGTG |
| | | GATACATCTAAGAATCAGTTTTCCCTGAAGCTGAGCTCCGTGAC |
| | | CGCAGCAGACACAGCCGTGTACTATTGTGCCCGGGACCCCAT |
| | | GTACATCCCCAACTACTCCTATGGCGTGATGAATGCCTGGGGC |
| | | CAGGGCACCACAGTGACAGTGTCTAGC |
| SEQ ID NO: 243 | Heavy | QVQLQESGPGLVKPSETLSLTCTVSGFSLTTYNVHWIRQPPGKGL |
| | Chain | EWIGRMRYSGDTSFNAALTSRVTISVDTSKNQFSLKLSSVTAADTA |
| | | VYYCARDPMYIPNYSYGVMNAWGQGTTVTVSSASTKGPSVFPLA |
| | | PSSKSTSGGTAALGCLVKDYFPEPVTVSWNSGALTSGVHTFPAVL |
| | | QSSGLYSLSSVVTVPSSSLGTQTYICNVNHKPSNTKVDKRVEPKS |
| | | CDKTHTCPPCPAPEAAGGPSVFLFPPKPKDTLMISRTPEVTCVVV |
| | | DVSHEDPEVKFNVVYVDGVEVHNAKTKPREEQYNSTYRVVSVLTV |
| | | LHQDWLNGKEYKCKVSNKALPAPIEKTISKAKGQPREPQVYTLPP |
| | | SREEMTKNQVSLTCLVKGFYPSDIAVEVVESNGQPENNYKTTPPVL |
| | | DSDGSFFLYSKLTVDKSRWQQGNVFSCSVMHEALHNHYTQKSLS |
| | | LSPGK |
| SEQ ID NO: 244 | DNA | CAGGTGCAGCTGCAGGAGTCTGGACCTGGACTGGTGAAGCCA |
| | Heavy | AGCGAGACCCTGTCCCTGACCTGCACAGTGTCCGGCTTCTCTC |
| | Chain | TGACCACATACAACGTGCACTGGATCAGGCAGCCACCTGGCAA |
| | | GGGACTGGAGTGGATCGGCCGGATGAGATATTCTGGCGACAC |
| | | CAGCTTCAACGCCGCCCTGACCAGCAGGGTGACAATCTCCGTG |
| | | GATACATCTAAGAATCAGTTTTCCCTGAAGCTGAGCTCCGTGAC |
| | | CGCAGCAGACACAGCCGTGTACTATTGTGCCCGGGACCCCAT |
| | | GTACATCCCCAACTACTCCTATGGCGTGATGAATGCCTGGGGC |
| | | CAGGGCACCACAGTGACAGTGTCTAGCGCTAGCACCAAGGGC |
| | | CCATCGGTCTTCCCCCTGGCACCCTCCTCCAAGAGCACCTCTG |
| | | GGGGCACAGCGGCCCTGGGCTGCCTGGTCAAGGACTACTTCC |
| | | CCGAACCGGTGACGGTGTCGTGGAACTCAGGCGCCCTGACCA |
| | | GCGGCGTGCACACCTTCCCGGCTGTCCTACAGTCCTCAGGACT |
| | | CTACTCCCTCAGCAGCGTGGTGACCGTGCCCTCCAGCAGCTTG |
| | | GGCACCCAGACCTACATCTGCAACGTGAATCACAAGCCCAGCA |
| | | ACACCAAGGTGGACAAGAGAGTTGAGCCCAAATCTTGTGACAA |
| | | AACTCACACATGCCCACCGTGCCCAGCACCTGAAGCCGCTGG |
| | | GGGACCGTCAGTCTTCCTCTTCCCCCCAAAACCCAAGGACACC |
| | | CTCATGATCTCCCGGACCCCTGAGGTCACATGCGTGGTGGTGG |
| | | ACGTGAGCCACGAAGACCCTGAGGTCAAGTTCAACTGGTACGT |
| | | GGACGGCGTGGAGGTGCATAATGCCAAGACAAAGCCGCGGGA |
| | | GGAGCAGTACAACAGCACGTACCGTGTGGTCAGCGTCCTCACC |
| | | GTCCTGCACCAGGACTGGCTGAATGGCAAGGAGTACAAGTGCA |
| | | AGGTCTCCAACAAAGCCCTCCCAGCCCCCATCGAGAAAACCAT |
| | | CTCCAAAGCCAAAGGGCAGCCCCGAGAACCACAGGTGTACAC |
| | | CCTGCCCCCATCCCGGGAGGAGATGACCAAGAACCAGGTCAG |
| | | CCTGACCTGCCTGGTCAAAGGCTTCTATCCCAGCGACATCGCC |
| | | GTGGAGTGGGAGAGCAATGGGCAGCCGGAGAACAACTACAAG |
| | | ACCACGCCTCCCGTGCTGGACTCCGACGGCTCCTTCTTCCTCT |
| | | ACAGCAAGCTCACCGTGGACAAGAGCAGGTGGCAGCAGGGGA |
| | | ACGTCTTCTCATGCTCCGTGATGCATGAGGCTCTGCACAACCA |
| | | CTACACGCAGAAGAGCCTCTCCCTGTCTCCGGGTAAA |
| NOV229 LC | | |
| SEQ ID NO: 245 | LCDR1 | KASQNINNYLN |
| (Combined) | | |
| SEQ ID NO: 246 | LCDR2 | NTDHLQA |
| (Combined) | | |
| SEQ ID NO: 247 | LCDR3 | LQHRSRYT |
| (Combined) | | |
| SEQ ID NO: 248 | LCDR1 | KASQNINNYLN |
| (Kabat) | | |
| SEQ ID NO: 249 | LCDR2 | NTDHLQA |
| (Kabat) | | |
| SEQ ID NO: 250 | LCDR3 | LQHRSRYT |
| (Kabat) | | |
| SEQ ID NO: 251 | LCDR1 | SQNINNY |
| (Chothia) | | |
| SEQ ID NO: 252 | LCDR2 | NTD |
| (Chothia) | | |
| SEQ ID NO: 253 | LCDR3 | HRSRY |
| (Chothia) | | |
| SEQ ID NO: 254 | LCDR1 | QNINNY |
| (IMGT) | | |
| SEQ ID NO: 255 | LCDR2 | NTDHLQAGVP |
| (IMGT) | | |
| SEQ ID NO: 256 | LCDR3 | LQHRSRYT |
| (IMGT) | | |
| SEQ ID NO: 257 | VL | DIQMTQSPSSLSASVGDRVTITCKASQNINNYLNWYQQKPGKAPK |
| | | LLIYNTDHLQAGVPSRFSGSGSGTDFTLTISSLQPEDFATYYCLQH |
| | | RSRYTFGPGTKVDIK |
| SEQ ID NO: 258 | DNA VL | GACATCCAGATGACCCAGAGCCCTAGCTCCCTGTCCGCCTCTG |
| | | TGGGCGATAGGGTGACCATCACATGCAAGGCCTCCCAGAACAT |
| | | CAACAATTACCTGAATTGGTATCAGCAGAAGCCCGGCAAGGCC |
| | | CCTAAGCTGCTGATCTACAACACAGACCACCTGCAGGCAGGAG |
| | | TGCCATCTCGGTTCAGCGGCTCCGGCTCTGGAACCGACTTTAC |
| | | CCTGACAATCTCTAGCCTGCAGCCAGAGGATTTCGCCACATAC |
| | | TATTGTCTGCAGCACCGGAGCAGATATACCTTTGGCCCCGGCA |
| | | CAAAGGTGGATATCAAG |
| SEQ ID NO: 259 | Light | DIQMTQSPSSLSASVGDRVTITCKASQNINNYLNWYQQKPGKAPK |
| | chain | LLIYNTDHLQAGVPSRFSGSGSGTDFTLTISSLQPEDFATYYCLQH |
| | | RSRYTFGPGTKVDIKRTVAAPSVFIFPPSDEQLKSGTASVVCLLNN |
| | | FYPREAKVQWKVDNALQSGNSQESVTEQDSKDSTYSLSSTLTLS |
| | | KADYEKHKVYACEVTHQGLSSPVTKSFNRGEC |
| SEQ ID NO: 260 | DNA | GACATCCAGATGACCCAGAGCCCTAGCTCCCTGTCCGCCTCTG |
| | Light | TGGGCGATAGGGTGACCATCACATGCAAGGCCTCCCAGAACAT |
| | Chain | CAACAATTACCTGAATTGGTATCAGCAGAAGCCCGGCAAGGCC |
| | | CCTAAGCTGCTGATCTACAACACAGACCACCTGCAGGCAGGAG |
| | | TGCCATCTCGGTTCAGCGGCTCCGGCTCTGGAACCGACTTTAC |
| | | CCTGACAATCTCTAGCCTGCAGCCAGAGGATTTCGCCACATAC |
| | | TATTGTCTGCAGCACCGGAGCAGATATACCTTTGGCCCCGGCA |
| | | CAAAGGTGGATATCAAGCGTACGGTGGCTGCACCATCTGTCTT |
| | | CATCTTCCCGCCATCTGATGAGCAGTTGAAATCTGGAACTGCCT |
| | | CTGTTGTGTGCCTGCTGAATAACTTCTATCCCCGCGAGGCCAA |
| | | AGTACAGTGGAAGGTGGATAACGCCCTCCAATCGGGTAACTCC |
| | | CAGGAGAGTGTCACAGAGCAGGACAGCAAGGACAGCACCTAC |
| | | AGCCTCAGCAGCACCCTGACGCTGAGCAAAGCAGACTACGAG |
| | | AAACACAAAGTCTACGCCTGCGAAGTCACCCATCAGGGCCTGA |
| | | GCTCGCCCGTCACAAAGAGCTTCAACCGCGGAGAGTGT |
| NOV110 HC | | |
| SEQ ID NO: 261 | HCDR1 | GYTFTSYYIY |
| (Combined) | | |
| SEQ ID NO: 262 | HCDR2 | YIYPANGGIYYSEKFKG |
| (Combined) | | |
| SEQ ID NO: 263 | HCDR3 | PVTMMAPLVF |
| (Combined) | | |
| SEQ ID NO: 264 | HCDR1 | SYYIY |
| (Kabat) | | |
| SEQ ID NO: 265 | HCDR2 | YIYPANGGIYYSEKFKG |
| (Kabat) | | |
| SEQ ID NO: 266 | HCDR3 | PVTMMAPLVF |
| (Kabat) | | |
| SEQ ID NO: 267 | HCDR1 | GYTFTSY |
| (Chothia) | | |
| SEQ ID NO: 268 | HCDR2 | YPANGG |
| (Chothia) | | |
| SEQ ID NO: 269 | HCDR3 | PVTMMAPLVF |
| (Chothia) | | |
| SEQ ID NO: 270 | HCDR1 | GYTFTSYY |
| (IMGT) | | |
| SEQ ID NO: 271 | HCDR2 | IYPANGGI |
| (IMGT) | | |
| SEQ ID NO: 272 | HCDR3 | ARPVTMMAPLVF |
| (IMGT) | | |
| SEQ ID NO: 273 | VH | QVQLVQSGAEVKKPGASVKVSCKASGYTFTSYYIYWVRQAPGQR |
| | | LEVVMGYIYPANGGIYYSEKFKGRVTITADTSAGTAYMELSSLRSED |
| | | TAVYYCARPVTMMAPLVFWGQGTLVTVSS |
| SEQ ID NO: 274 | DNA VH | CAGGTGCAGCTGGTGCAGAGCGGAGCAGAGGTGAAGAAGCCA |
| | | GGAGCCTCCGTGAAGGTGTCTTGCAAGGCCAGCGGCTACACC |
| | | TTCACATCCTACTATATCTATTGGGTGCGGCAGGCACCAGGAC |
| | | AGAGACTGGAGTGGATGGGCTACATCTATCCCGCCAACGGCG |
| | | GCATCTACTATTCTGAGAAGTTTAAGGGCCGGGTGACCATCAC |
| | | AGCCGACACCTCCGCCGGCACAGCCTACATGGAGCTGAGCTC |
| | | CCTGAGGTCTGAGGATACCGCCGTGTACTATTGTGCCCGCCCC |
| | | GTGACAATGATGGCACCTCTGGTGTTCTGGGGACAGGGCACC |
| | | CTGGTGACAGTGTCTAGC |
| SEQ ID NO: 275 | Heavy | QVQLVQSGAEVKKPGASVKVSCKASGYTFTSYYIYWVRQAPGQR |
| | Chain | LEWMGYIYPANGGIYYSEKFKGRVTITADTSAGTAYMELSSLRSED |
| | | TAVYYCARPVTMMAPLVFWGQGTLVTVSSASTKGPSVFPLAPSS |
| | | KSTSGGTAALGCLVKDYFPEPVTVSVVNSGALTSGVHTFPAVLQSS |
| | | GLYSLSSVVTVPSSSLGTQTYICNVNHKPSNTKVDKRVEPKSCDK |
| | | THTCPPCPAPEAAGGPSVFLFPPKPKDTLMISRTPEVTCVVVDVS |
| | | HEDPEVKFNVVYVDGVEVHNAKTKPREEQYNSTYRVVSVLTVLHQ |
| | | DWLNGKEYKCKVSNKALPAPIEKTISKAKGQPREPQVYTLPPSRE |
| | | EMTKNQVSLTCLVKGFYPSDIAVEWESNGQPENNYKTTPPVLDSD |
| | | GSFFLYSKLTVDKSRWQQGNVFSCSVMHEALHNHYTQKSLSLSP |
| | | GK |
| SEQ ID NO: 276 | DNA | CAGGTGCAGCTGGTGCAGAGCGGAGCAGAGGTGAAGAAGCC |
| | Heavy | AGGAGCCTCCGTGAAGGTGTCTTGCAAGGCCAGCGGCTACAC |
| | Chain | CTTCACATCCTACTATATCTATTGGGTGCGGCAGGCACCAGGA |
| | | CAGAGACTGGAGTGGATGGGCTACATCTATCCCGCCAACGGC |
| | | GGCATCTACTATTCTGAGAAGTTTAAGGGCCGGGTGACCATCA |
| | | CAGCCGACACCTCCGCCGGCACAGCCTACATGGAGCTGAGCT |
| | | CCCTGAGGTCTGAGGATACCGCCGTGTACTATTGTGCCCGCCC |
| | | CGTGACAATGATGGCACCTCTGGTGTTCTGGGGACAGGGCAC |
| | | CCTGGTGACAGTGTCTAGCGCTAGCACCAAGGGCCCATCGGT |
| | | CTTCCCCCTGGCACCCTCCTCCAAGAGCACCTCTGGGGGCACA |
| | | GCGGCCCTGGGCTGCCTGGTCAAGGACTACTTCCCCGAACCG |
| | | GTGACGGTGTCGTGGAACTCAGGCGCCCTGACCAGCGGCGTG |
| | | CACACCTTCCCGGCTGTCCTACAGTCCTCAGGACTCTACTCCC |
| | | TCAGCAGCGTGGTGACCGTGCCCTCCAGCAGCTTGGGCACCC |
| | | AGACCTACATCTGCAACGTGAATCACAAGCCCAGCAACACCAA |
| | | GGTGGACAAGAGAGTTGAGCCCAAATCTTGTGACAAAACTCAC |
| | | ACATGCCCACCGTGCCCAGCACCTGAAGCCGCTGGGGGACCG |
| | | TCAGTCTTCCTCTTCCCCCCAAAACCCAAGGACACCCTCATGAT |
| | | CTCCCGGACCCCTGAGGTCACATGCGTGGTGGTGGACGTGAG |
| | | CCACGAAGACCCTGAGGTCAAGTTCAACTGGTACGTGGACGGC |
| | | GTGGAGGTGCATAATGCCAAGACAAAGCCGCGGGAGGAGCAG |
| | | TACAACAGCACGTACCGTGTGGTCAGCGTCCTCACCGTCCTGC |
| | | ACCAGGACTGGCTGAATGGCAAGGAGTACAAGTGCAAGGTCTC |
| | | CAACAAAGCCCTCCCAGCCCCCATCGAGAAAACCATCTCCAAA |
| | | GCCAAAGGGCAGCCCCGAGAACCACAGGTGTACACCCTGCCC |
| | | CCATCCCGGGAGGAGATGACCAAGAACCAGGTCAGCCTGACC |
| | | TGCCTGGTCAAAGGCTTCTATCCCAGCGACATCGCCGTGGAGT |
| | | GGGAGAGCAATGGGCAGCCGGAGAACAACTACAAGACCACGC |
| | | CTCCCGTGCTGGACTCCGACGGCTCCTTCTTCCTCTACAGCAA |
| | | GCTCACCGTGGACAAGAGCAGGTGGCAGCAGGGGAACGTCTT |
| | | CTCATGCTCCGTGATGCATGAGGCTCTGCACAACCACTACACG |
| | | CAGAAGAGCCTCTCCCTGTCTCCGGGTAAA |
| NOV110 LC | | |
| SEQ ID NO: 277 | LCDR1 | RSSQSLVYSHGNTYLH |
| (Combined) | | |
| SEQ ID NO: 278 | LCDR2 | RVSNRFS |
| (Combined) | | |
| SEQ ID NO: 279 | LCDR3 | FQSTHLPYT |
| (Combined) | | |
| SEQ ID NO: 280 | LCDR1 | RSSQSLVYSHGNTYLH |
| (Kabat) | | |
| SEQ ID NO: 281 | LCDR2 | RVSNRFS |
| (Kabat) | | |
| SEQ ID NO: 282 | LCDR3 | FQSTHLPYT |
| (Kabat) | | |
| SEQ ID NO: 283 | LCDR1 | SQSLVYSHGNTY |
| (Chothia) | | |
| SEQ ID NO: 284 | LCDR2 | RVS |
| (Chothia) | | |
| SEQ ID NO: 285 | LCDR3 | STHLPY |
| (Chothia) | | |
| SEQ ID NO: 286 | LCDR1 | QSLVYSHGNTY |
| (IMGT) | | |
| SEQ ID NO: 287 | LCDR2 | RVS |
| (IMGT) | | |
| SEQ ID NO: 288 | LCDR3 | FQSTHLPYT |
| (IMGT) | | |
| SEQ ID NO: 289 | VL | DVVMTQSPLSLPVTLGQPASISCRSSQSLVYSHGNTYLHWYQQR |
| | | PGQSPRLLIYRVSNRFSGVPDRFSGSGSGTDFTLKISRVEAEDVG |
| | | VYYCFQSTHLPYTFGQGTKLEIK |
| SEQ ID NO: 290 | DNA VL | GACGTGGTCATGACACAGTCCCCACTGTCTCTGCCTGTGACCC |
| | | TGGGACAGCCAGCCTCTATCAGCTGCCGGAGCTCCCAGAGCC |
| | | TGGTGTACTCCCACGGCAACACATACCTGCACTGGTATCAGCA |
| | | GAGGCCAGGACAGTCCCCAAGGCTGCTGATCTATCGGGTGTCT |
| | | AATAGATTCAGCGGCGTGCCTGACCGGTTTTCCGGCTCTGGCA |
| | | GCGGCACCGATTTCACACTGAAGATCTCCAGGGTGGAGGCCG |
| | | AGGATGTGGGCGTGTACTATTGTTTCCAGTCTACCCACCTGCC |
| | | ATACACATTTGGCCAGGGCACCAAGCTGGAGATCAAG |
| SEQ ID NO: 291 | Light | DVVMTQSPLSLPVTLGQPASISCRSSQSLVYSHGNTYLHWYQQR |
| | chain | PGQSPRLLIYRVSNRFSGVPDRFSGSGSGTDFTLKISRVEAEDVG |
| | | VYYCFQSTHLPYTFGQGTKLEIKRTVAAPSVFIFPPSDEQLKSGTA |
| | | SVVCLLNNFYPREAKVQWKVDNALQSGNSQESVTEQDSKDSTYS |
| | | LSSTLTLSKADYEKHKVYACEVTHQGLSSPVTKSFNRGEC |
| SEQ ID NO: 292 | DNA | GACGTGGTCATGACACAGTCCCCACTGTCTCTGCCTGTGACCC |
| | Light | TGGGACAGCCAGCCTCTATCAGCTGCCGGAGCTCCCAGAGCC |
| | Chain | TGGTGTACTCCCACGGCAACACATACCTGCACTGGTATCAGCA |
| | | GAGGCCAGGACAGTCCCCAAGGCTGCTGATCTATCGGGTGTCT |
| | | AATAGATTCAGCGGCGTGCCTGACCGGTTTTCCGGCTCTGGCA |
| | | GCGGCACCGATTTCACACTGAAGATCTCCAGGGTGGAGGCCG |
| | | AGGATGTGGGCGTGTACTATTGTTTCCAGTCTACCCACCTGCC |
| | | ATACACATTTGGCCAGGGCACCAAGCTGGAGATCAAGCGTACG |
| | | GTGGCTGCACCATCTGTCTTCATCTTCCCGCCATCTGATGAGC |
| | | AGTTGAAATCTGGAACTGCCTCTGTTGTGTGCCTGCTGAATAAC |
| | | TTCTATCCCCGCGAGGCCAAAGTACAGTGGAAGGTGGATAACG |
| | | CCCTCCAATCGGGTAACTCCCAGGAGAGTGTCACAGAGCAGGA |
| | | CAGCAAGGACAGCACCTACAGCCTCAGCAGCACCCTGACGCT |
| | | GAGCAAAGCAGACTACGAGAAACACAAAGTCTACGCCTGCGAA |
| | | GTCACCCATCAGGGCCTGAGCTCGCCCGTCACAAAGAGCTTCA |
| | | ACCGCGGAGAGTGT |
| NOV832 HC | | |
| SEQ ID NO: 293 | HCDR1 | GYTFTSYYIY |
| (Combined) | | |
| SEQ ID NO: 294 | HCDR2 | YIYPANGGIYYSEKFKG |
| (Combined) | | |
| SEQ ID NO: 295 | HCDR3 | PVTMMAPLVF |
| (Combined) | | |
| SEQ ID NO: 296 | HCDR1 | SYYIY |
| (Kabat) | | |
| SEQ ID NO: 297 | HCDR2 | YIYPANGGIYYSEKFKG |
| (Kabat) | | |
| SEQ ID NO: 298 | HCDR3 | PVTMMAPLVF |
| (Kabat) | | |
| SEQ ID NO: 299 | HCDR1 | GYTFTSY |
| (Chothia) | | |
| SEQ ID NO: 300 | HCDR2 | YPANGG |
| (Chothia) | | |
| SEQ ID NO: 301 | HCDR3 | PVTMMAPLVF |
| (Chothia) | | |
| SEQ ID NO: 302 | HCDR1 | GYTFTSYY |
| (IMGT) | | |
| SEQ ID NO: 303 | HCDR2 | IYPANGGI |
| (IMGT) | | |
| SEQ ID NO: 304 | HCDR3 | ARPVTMMAPLVF |
| (IMGT) | | |
| SEQ ID NO: 305 | VH | QVQLVQSGAEVKKPGASVKVSCKASGYTFTSYYIYWVRQAPGQR |
| | | LEWMGYIYPANGGIYYSEKFKGRVTITRDTSASTAYMELSSLRSED |
| | | TAVYYCARPVTMMAPLVFWGQGTLVTVSS |
| SEQ ID NO: 306 | DNA VH | CAGGTGCAGCTGGTGCAGAGCGGAGCAGAGGTGAAGAAGCCA |
| | | GGAGCCAGCGTGAAGGTGTCCTGCAAGGCCTCTGGCTACACC |
| | | TTCACATCCTACTATATCTATTGGGTGAGGCAGGCACCAGGAC |
| | | AGCGCCTGGAGTGGATGGGCTACATCTATCCCGCCAACGGCG |
| | | GCATCTACTATTCTGAGAAGTTTAAGGGCCGGGTGACCATCAC |
| | | AAGAGACACCTCCGCCTCTACAGCCTACATGGAGCTGAGCTCC |
| | | CTGCGGAGCGAGGATACCGCCGTGTACTATTGTGCCAGGCCC |
| | | GTGACAATGATGGCACCTCTGGTGTTCTGGGGACAGGGCACC |
| | | CTGGTGACAGTGTCTAGC |
| SEQ ID NO: 307 | Heavy | QVQLVQSGAEVKKPGASVKVSCKASGYTFTSYYIYWVRQAPGQR |
| | Chain | LEWMGYIYPANGGIYYSEKFKGRVTITRDTSASTAYMELSSLRSED |
| | | TAVYYCARPVTMMAPLVFWGQGTLVTVSSASTKGPSVFPLAPSS |
| | | KSTSGGTAALGCLVKDYFPEPVTVSWNSGALTSGVHTFPAVLQSS |
| | | GLYSLSSVVTVPSSSLGTQTYICNVNHKPSNTKVDKRVEPKSCDK |
| | | THTCPPCPAPEAAGGPSVFLFPPKPKDTLMISRTPEVTCVVVDVS |
| | | HEDPEVKFNWYVDGVEVHNAKTKPREEQYNSTYRVVSVLTVLHQ |
| | | DWLNGKEYKCKVSNKALPAPIEKTISKAKGQPREPQVYTLPPSRE |
| | | EMTKNQVSLTCLVKGFYPSDIAVEWESNGQPENNYKTTPPVLDSD |
| | | GSFFLYSKLTVDKSRWQQGNVFSCSVMHEALHNHYTQKSLSLSP |
| | | GK |
| SEQ ID NO: 308 | DNA | CAGGTGCAGCTGGTGCAGAGCGGAGCAGAGGTGAAGAAGCC |
| | Heavy | AGGAGCCAGCGTGAAGGTGTCCTGCAAGGCCTCTGGCTACAC |
| | Chain | CTTCACATCCTACTATATCTATTGGGTGAGGCAGGCACCAGGA |
| | | CAGCGCCTGGAGTGGATGGGCTACATCTATCCCGCCAACGGC |
| | | GGCATCTACTATTCTGAGAAGTTTAAGGGCCGGGTGACCATCA |
| | | CAAGAGACACCTCCGCCTCTACAGCCTACATGGAGCTGAGCTC |
| | | CCTGCGGAGCGAGGATACCGCCGTGTACTATTGTGCCAGGCC |
| | | CGTGACAATGATGGCACCTCTGGTGTTCTGGGGACAGGGCAC |
| | | CCTGGTGACAGTGTCTAGCGCTAGCACCAAGGGCCCATCGGT |
| | | CTTCCCCCTGGCACCCTCCTCCAAGAGCACCTCTGGGGGCACA |
| | | GCGGCCCTGGGCTGCCTGGTCAAGGACTACTTCCCCGAACCG |
| | | GTGACGGTGTCGTGGAACTCAGGCGCCCTGACCAGCGGCGTG |
| | | CACACCTTCCCGGCTGTCCTACAGTCCTCAGGACTCTACTCCC |
| | | TCAGCAGCGTGGTGACCGTGCCCTCCAGCAGCTTGGGCACCC |
| | | AGACCTACATCTGCAACGTGAATCACAAGCCCAGCAACACCAA |
| | | GGTGGACAAGAGAGTTGAGCCCAAATCTTGTGACAAAACTCAC |
| | | ACATGCCCACCGTGCCCAGCACCTGAAGCCGCTGGGGGACCG |
| | | TCAGTCTTCCTCTTCCCCCCAAAACCCAAGGACACCCTCATGAT |
| | | CTCCCGGACCCCTGAGGTCACATGCGTGGTGGTGGACGTGAG |
| | | CCACGAAGACCCTGAGGTCAAGTTCAACTGGTACGTGGACGGC |
| | | GTGGAGGTGCATAATGCCAAGACAAAGCCGCGGGAGGAGCAG |
| | | TACAACAGCACGTACCGTGTGGTCAGCGTCCTCACCGTCCTGC |
| | | ACCAGGACTGGCTGAATGGCAAGGAGTACAAGTGCAAGGTCTC |
| | | CAACAAAGCCCTCCCAGCCCCCATCGAGAAAACCATCTCCAAA |
| | | GCCAAAGGGCAGCCCCGAGAACCACAGGTGTACACCCTGCCC |
| | | CCATCCCGGGAGGAGATGACCAAGAACCAGGTCAGCCTGACC |
| | | TGCCTGGTCAAAGGCTTCTATCCCAGCGACATCGCCGTGGAGT |
| | | GGGAGAGCAATGGGCAGCCGGAGAACAACTACAAGACCACGC |
| | | CTCCCGTGCTGGACTCCGACGGCTCCTTCTTCCTCTACAGCAA |
| | | GCTCACCGTGGACAAGAGCAGGTGGCAGCAGGGGAACGTCTT |
| | | CTCATGCTCCGTGATGCATGAGGCTCTGCACAACCACTACACG |
| | | CAGAAGAGCCTCTCCCTGTCTCCGGGTAAA |
| NOV832 LC | | |
| SEQ ID NO: 309 | LCDR1 | RSSQSLVYSHGNTYLH |
| (Combined) | | |
| SEQ ID NO: 310 | LCDR2 | RVSNRFS |
| (Combined) | | |
| SEQ ID NO: 311 | LCDR3 | FQSTHLPYT |
| (Combined) | | |
| SEQ ID NO: 312 | LCDR1 | RSSQSLVYSHGNTYLH |
| (Kabat) | | |
| SEQ ID NO: 313 | LCDR2 | RVSNRFS |
| (Kabat) | | |
| SEQ ID NO: 314 | LCDR3 | FQSTHLPYT |
| (Kabat) | | |
| SEQ ID NO: 315 | LCDR1 | SQSLVYSHGNTY |
| (Chothia) | | |
| SEQ ID NO: 316 | LCDR2 | RVS |
| (Chothia) | | |
| SEQ ID NO: 317 | LCDR3 | STHLPY |
| (Chothia) | | |
| SEQ ID NO: 318 | LCDR1 | QSLVYSHGNTY |
| (IMGT) | | |
| SEQ ID NO: 319 | LCDR2 | RVS |
| (IMGT) | | |
| SEQ ID NO: 320 | LCDR3 | FQSTHLPYT |
| (IMGT) | | |
| SEQ ID NO: 321 | VL | DVVMTQSPLSLPVTLGQPASISCRSSQSLVYSHGNTYLHWFQQR |
| | | PGQSPRRLIYRVSNRFSGVPDRFSGSGSGTDFTLKISRVEAEDVG |
| | | VYYCFQSTHLPYTFGQGTKLEIK |
| SEQ ID NO: 322 | DNA VL | GACGTGGTCATGACACAGTCCCCACTGTCTCTGCCTGTGACCC |
| | | TGGGACAGCCAGCCTCTATCAGCTGCAGGAGCTCCCAGAGCC |
| | | TGGTGTACTCCCACGGCAACACATATCTGCACTGGTTCCAGCA |
| | | GAGACCAGGACAGTCCCCACGGAGACTGATCTACAGGGTGTCT |
| | | AATCGCTTCAGCGGCGTGCCTGACCGGTTTTCCGGCTCTGGCA |
| | | GCGGAACCGACTTCACCCTGAAGATCTCCAGAGTGGAGGCCG |
| | | AGGATGTGGGCGTGTACTATTGTTTCCAGTCTACCCACCTGCC |
| | | ATATACATTTGGCCAGGGCACCAAGCTGGAGATCAAG |
| SEQ ID NO: 323 | Light | DVVMTQSPLSLPVTLGQPASISCRSSQSLVYSHGNTYLHWFQQR |
| | chain | PGQSPRRLIYRVSNRFSGVPDRFSGSGSGTDFTLKISRVEAEDVG |
| | | VYYCFQSTHLPYTFGQGTKLEIKRTVAAPSVFIFPPSDEQLKSGTA |
| | | SVVCLLNNFYPREAKVQWKVDNALQSGNSQESVTEQDSKDSTYS |
| | | LSSTLTLSKADYEKHKVYACEVTHQGLSSPVTKSFNRGEC |
| SEQ ID NO: 324 | DNA | GACGTGGTCATGACACAGTCCCCACTGTCTCTGCCTGTGACCC |
| | Light | TGGGACAGCCAGCCTCTATCAGCTGCAGGAGCTCCCAGAGCC |
| | Chain | TGGTGTACTCCCACGGCAACACATATCTGCACTGGTTCCAGCA |
| | | GAGACCAGGACAGTCCCCACGGAGACTGATCTACAGGGTGTCT |
| | | AATCGCTTCAGCGGCGTGCCTGACCGGTTTTCCGGCTCTGGCA |
| | | GCGGAACCGACTTCACCCTGAAGATCTCCAGAGTGGAGGCCG |
| | | AGGATGTGGGCGTGTACTATTGTTTCCAGTCTACCCACCTGCC |
| | | ATATACATTTGGCCAGGGCACCAAGCTGGAGATCAAGCGTACG |
| | | GTGGCTGCACCATCTGTCTTCATCTTCCCGCCATCTGATGAGC |
| | | AGTTGAAATCTGGAACTGCCTCTGTTGTGTGCCTGCTGAATAAC |
| | | TTCTATCCCCGCGAGGCCAAAGTACAGTGGAAGGTGGATAACG |
| | | CCCTCCAATCGGGTAACTCCCAGGAGAGTGTCACAGAGCAGGA |
| | | CAGCAAGGACAGCACCTACAGCCTCAGCAGCACCCTGACGCT |
| | | GAGCAAAGCAGACTACGAGAAACACAAAGTCTACGCCTGCGAA |
| | | GTCACCCATCAGGGCCTGAGCTCGCCCGTCACAAAGAGCTTCA |
| | | ACCGCGGAGAGTGT |
| NOV589HC | | |
| SEQ ID NO: 325 | HCDR1 | GFTFSKNGMH |
| (Combined) | | |
| SEQ ID NO: 326 | HCDR2 | MIYYDSSRMYYADTVKG |
| (Combined) | | |
| SEQ ID NO: 327 | HCDR3 | FVWVDLDFDY |
| (Combined) | | |
| SEQ ID NO: 328 | HCDR1 | KNGMH |
| (Kabat) | | |
| SEQ ID NO: 329 | HCDR2 | MIYYDSSRMYYADTVKG |
| (Kabat) | | |
| SEQ ID NO: 330 | HCDR3 | FWWDLDFDY |
| (Kabat) | | |
| SEQ ID NO: 331 | HCDR1 | GFTFSKN |
| (Chothia) | | |
| SEQ ID NO: 332 | HCDR2 | YYDSSR |
| (Chothia) | | |
| SEQ ID NO: 333 | HCDR3 | FWWDLDFDY |
| (Chothia) | | |
| SEQ ID NO: 334 | HCDR1 | GFTFSKNG |
| (IMGT) | | |
| SEQ ID NO: 335 | HCDR2 | IYYDSSRM |
| (IMGT) | | |
| SEQ ID NO: 336 | HCDR3 | ASFWWDLDFDY |
| (IMGT) | | |
| SEQ ID NO: 337 | VH | QVQLVESGGGVVQPGRSLRLSCAASGFTFSKNGMHWVRQAPGK |
| | | GLEWVAMIYYDSSRMYYADTVKGRFTISRDNSKNTLYLQMNSLRA |
| | | EDTAVYYCASFWWDLDFDYWGQGTMVTVSS |
| SEQ ID NO: 338 | DNA VH | AGGTGCAGCTGGTGGAGTCTGGAGGAGGAGTGGTGCAGCCAG |
| | | GCCGGTCCCTGAGACTGTCTTGCGCCGCCAGCGGCTTCACCTT |
| | | TAGCAAGAACGGAATGCACTGGGTGCGGCAGGCACCTGGCAA |
| | | GGGACTGGAGTGGGTGGCCATGATCTACTATGATAGCTCCAGG |
| | | ATGTACTATGCCGACACCGTGAAGGGCAGGTTCACAATCTCCC |
| | | GCGATAACTCTAAGAATACCCTGTACCTGCAGATGAATAGCCTG |
| | | CGGGCCGAGGACACAGCCGTGTACTATTGTGCCTCCTTCTGGT |
| | | GGGACCTGGATTTTGACTATTGGGGCCAGGGCACCATGGTGAC |
| | | AGTGTCTAGC |
| SEQ ID NO: 339 | Heavy | QVQLVESGGGVVQPGRSLRLSCAASGFTFSKNGMHWVRQAPG |
| | Chain | KGLEWVAMIYYDSSRMYYADTVKGRFTISRDNSKNTLYLQMNSLR |
| | | AEDTAVYYCASFWWDLDFDYWGQGTMVTVSSASTKGPSVFPLA |
| | | PSSKSTSGGTAALGCLVKDYFPEPVTVSWNSGALTSGVHTFPAVL |
| | | QSSGLYSLSSVVTVPSSSLGTQTYICNVNHKPSNTKVDKRVEPKS |
| | | CDKTHTCPPCPAPEAAGGPSVFLFPPKPKDTLMISRTPEVTCVVV |
| | | DVSHEDPEVKFNWYVDGVEVHNAKTKPREEQYNSTYRVVSVLTV |
| | | LHQDWLNGKEYKCKVSNKALPAPIEKTISKAKGQPREPQVYTLPP |
| | | SREEMTKNQVSLTCLVKGFYPSDIAVEWESNGQPENNYKTTPPVL |
| | | DSDGSFFLYSKLTVDKSRWQQGNVFSCSVMHEALHNHYTQKSLS |
| | | LSPGK |
| SEQ ID NO: 340 | DNA | AGGTGCAGCTGGTGGAGTCTGGAGGAGGAGTGGTGCAGCCA |
| | Heavy | GGCCGGTCCCTGAGACTGTCTTGCGCCGCCAGCGGCTTCACC |
| | Chain | TTTAGCAAGAACGGAATGCACTGGGTGCGGCAGGCACCTGGC |
| | | AAGGGACTGGAGTGGGTGGCCATGATCTACTATGATAGCTCCA |
| | | GGATGTACTATGCCGACACCGTGAAGGGCAGGTTCACAATCTC |
| | | CCGCGATAACTCTAAGAATACCCTGTACCTGCAGATGAATAGC |
| | | CTGCGGGCCGAGGACACAGCCGTGTACTATTGTGCCTCCTTCT |
| | | GGTGGGACCTGGATTTTGACTATTGGGGCCAGGGCACCATGGT |
| | | GACAGTGTCTAGCGCTAGCACCAAGGGCCCATCGGTCTTCCCC |
| | | CTGGCACCCTCCTCCAAGAGCACCTCTGGGGGCACAGCGGCC |
| | | CTGGGCTGCCTGGTCAAGGACTACTTCCCCGAACCGGTGACG |
| | | GTGTCGTGGAACTCAGGCGCCCTGACCAGCGGCGTGCACACC |
| | | TTCCCGGCTGTCCTACAGTCCTCAGGACTCTACTCCCTCAGCA |
| | | GCGTGGTGACCGTGCCCTCCAGCAGCTTGGGCACCCAGACCT |
| | | ACATCTGCAACGTGAATCACAAGCCCAGCAACACCAAGGTGGA |
| | | CAAGAGAGTTGAGCCCAAATCTTGTGACAAAACTCACACATGC |
| | | CCACCGTGCCCAGCACCTGAAGCCGCTGGGGGACCGTCAGTC |
| | | TTCCTCTTCCCCCCAAAACCCAAGGACACCCTCATGATCTCCC |
| | | GGACCCCTGAGGTCACATGCGTGGTGGTGGACGTGAGCCACG |
| | | AAGACCCTGAGGTCAAGTTCAACTGGTACGTGGACGGCGTGGA |
| | | GGTGCATAATGCCAAGACAAAGCCGCGGGAGGAGCAGTACAA |
| | | CAGCACGTACCGTGTGGTCAGCGTCCTCACCGTCCTGCACCAG |
| | | GACTGGCTGAATGGCAAGGAGTACAAGTGCAAGGTCTCCAACA |
| | | AAGCCCTCCCAGCCCCCATCGAGAAAACCATCTCCAAAGCCAA |
| | | AGGGCAGCCCCGAGAACCACAGGTGTACACCCTGCCCCCATC |
| | | CCGGGAGGAGATGACCAAGAACCAGGTCAGCCTGACCTGCCT |
| | | GGTCAAAGGCTTCTATCCCAGCGACATCGCCGTGGAGTGGGA |
| | | GAGCAATGGGCAGCCGGAGAACAACTACAAGACCACGCCTCC |
| | | CGTGCTGGACTCCGACGGCTCCTTCTTCCTCTACAGCAAGCTC |
| | | ACCGTGGACAAGAGCAGGTGGCAGCAGGGGAACGTCTTCTCA |
| | | TGCTCCGTGATGCATGAGGCTCTGCACAACCACTACACGCAGA |
| | | AGAGCCTCTCCCTGTCTCCGGGTAAA |
| NOV589 LC | | |
| SEQ ID NO: 341 | LCDR1 | RSSQSLVRSDGTTYFN |
| (Combined) | | |
| SEQ ID NO: 342 | LCDR2 | RVSNRFS |
| (Combined) | | |
| SEQ ID NO: 343 | LCDR3 | LQSSHFPVVT |
| (Combined) | | |
| SEQ ID NO: 344 | LCDR1 | RSSQSLVRSDGTTYFN |
| (Kabat) | | |
| SEQ ID NO: 345 | LCDR2 | RVSNRFS |
| (Kabat) | | |
| SEQ ID NO: 346 | LCDR3 | LQSSHFPWT |
| (Kabat) | | |
| SEQ ID NO: 347 | LCDR1 | SQSLVRSDGTTY |
| (Chothia) | | |
| SEQ ID NO: 348 | LCDR2 | RVS |
| (Chothia) | | |
| SEQ ID NO: 349 | LCDR3 | SSHFPW |
| (Chothia) | | |
| SEQ ID NO: 350 | LCDR1 | QSLVRSDGTTY |
| (IMGT) | | |
| SEQ ID NO: 351 | LCDR2 | RVS |
| (IMGT) | | |
| SEQ ID NO: 352 | LCDR3 | LQSSHFPWT |
| (IMGT) | | |
| SEQ ID NO: 353 | VL | DIVMTQTPLSSPVTLGQPASISCRSSQSLVRSDGTTYFNWYQQRP |
| | | GQPPRLLIYRVSNRFSGVPDRFSGSGAGTDFTLKISRVEAEDVGV |
| | | YYCLQSSHFPWTFGGGTKVEIK |
| SEQ ID NO: 354 | DNA VL | GACATCGTGATGACCCAGACACCACTGAGCTCCCCAGTGACCC |
| | | TGGGACAGCCAGCCAGCATCTCCTGCCGGTCTAGCCAGTCCCT |
| | | GGTGAGATCTGATGGCACCACATACTTCAACTGGTATCAGCAG |
| | | AGGCCTGGACAGCCACCTAGGCTGCTGATCTACCGGGTGAGC |
| | | AATAGATTCTCCGGCGTGCCAGACAGGTTTTCTGGCAGCGGAG |
| | | CAGGAACCGACTTCACCCTGAAGATCTCTAGAGTGGAGGCCGA |
| | | GGACGTGGGCGTGTACTATTGTCTGCAGTCCTCTCACTTCCCT |
| | | TGGACCTTTGGCGGCGGCACAAAGGTGGAGATCAAG |
| SEQ ID NO: 355 | Light | DIVMTQTPLSSPVTLGQPASISCRSSQSLVRSDGTTYFNWYQQRP |
| | chain | GQPPRLLIYRVSNRFSGVPDRFSGSGAGTDFTLKISRVEAEDVGV |
| | | YYCLQSSHFPWTFGGGTKVEIKRTVAAPSVFIFPPSDEQLKSGTAS |
| | | VVCLLNNFYPREAKVQWKVDNALQSGNSQESVTEQDSKDSTYSL |
| | | SSTLTLSKADYEKHKVYACEVTHQGLSSPVTKSFNRGEC |
| SEQ ID NO: 356 | DNA | GACATCGTGATGACCCAGACACCACTGAGCTCCCCAGTGACCC |
| | Light | TGGGACAGCCAGCCAGCATCTCCTGCCGGTCTAGCCAGTCCCT |
| | Chain | GGTGAGATCTGATGGCACCACATACTTCAACTGGTATCAGCAG |
| | | AGGCCTGGACAGCCACCTAGGCTGCTGATCTACCGGGTGAGC |
| | | AATAGATTCTCCGGCGTGCCAGACAGGTTTTCTGGCAGCGGAG |
| | | CAGGAACCGACTTCACCCTGAAGATCTCTAGAGTGGAGGCCGA |
| | | GGACGTGGGCGTGTACTATTGTCTGCAGTCCTCTCACTTCCCT |
| | | TGGACCTTTGGCGGCGGCACAAAGGTGGAGATCAAGCGTACG |
| | | GTGGCTGCACCATCTGTCTTCATCTTCCCGCCATCTGATGAGC |
| | | AGTTGAAATCTGGAACTGCCTCTGTTGTGTGCCTGCTGAATAAC |
| | | TTCTATCCCCGCGAGGCCAAAGTACAGTGGAAGGTGGATAACG |
| | | CCCTCCAATCGGGTAACTCCCAGGAGAGTGTCACAGAGCAGGA |
| | | CAGCAAGGACAGCACCTACAGCCTCAGCAGCACCCTGACGCT |
| | | GAGCAAAGCAGACTACGAGAAACACAAAGTCTACGCCTGCGAA |
| | | GTCACCCATCAGGGCCTGAGCTCGCCCGTCACAAAGAGCTTCA |
| | | ACCGCGGAGAGTGT |
| NOV580 HC | | |
| SEQ ID NO: 357 | HCDR1 | GFSLTTYNIH |
| (Combined) | | |
| SEQ ID NO: 358 | HCDR2 | RMRYSGDTSYSSALKS |
| (Combined) | | |
| SEQ ID NO: 359 | HCDR3 | DPMYIPGYSYGVMNA |
| (Combined) | | |
| SEQ ID NO: 360 | HCDR1 | TYNIH |
| (Kabat) | | |
| SEQ ID NO: 361 | HCDR2 | RMRYSGDTSYSSALKS |
| (Kabat) | | |
| SEQ ID NO: 362 | HCDR3 | DPMYIPGYSYGVMNA |
| (Kabat) | | |
| SEQ ID NO: 363 | HCDR1 | GFSLTTY |
| (Chothia) | | |
| SEQ ID NO: 364 | HCDR2 | RYSGD |
| (Chothia) | | |
| SEQ ID NO: 365 | HCDR3 | DPMYIPGYSYGVMNA |
| (Chothia) | | |
| SEQ ID NO: 366 | HCDR1 | GFSLTTYN |
| (IMGT) | | |
| SEQ ID NO: 367 | HCDR2 | MRYSGDT |
| (IMGT) | | |
| SEQ ID NO: 368 | HCDR3 | TRDPMYIPGYSYGVMNA |
| (IMGT) | | |
| SEQ ID NO: 369 | VH | QVQLQESGPGLVKPSETLSLTCTVSGFSLTTYNIHWIRQPPGKGLE |
| | | WIGRMRYSGDTSYSSALKSRVTISRDTSKNQVSLKLSSVTAADTA |
| | | VYYCTRDPMYIPGYSYGVMNAWGQGTTVTVSS |
| SEQ ID NO: 370 | DNA VH | CAGGTGCAGCTGCAGGAGTCCGGACCTGGACTGGTGAAGCCA |
| | | TCTGAGACCCTGAGCCTGACCTGCACAGTGAGCGGCTTCTCCC |
| | | TGACCACATACAACATCCACTGGATCAGACAGCCACCTGGCAA |
| | | GGGACTGGAGTGGATCGGCCGGATGAGATACTCCGGCGACAC |
| | | ATCTTATAGCTCCGCCCTGAAGTCTAGGGTGACCATCAGCCGC |
| | | GATACATCCAAGAACCAGGTGAGCCTGAAGCTGTCTAGCGTGA |
| | | CCGCCGCCGACACAGCCGTGTACTATTGTACCCGGGACCCCAT |
| | | GTATATCCCCGGCTACTCTTATGGCGTGATGAATGCCTGGGGC |
| | | CAGGGCACCACAGTGACAGTGTCCTCT |
| SEQ ID NO: 371 | Heavy | QVQLQESGPGLVKPSETLSLTCTVSGFSLTTYNIHWIRQPPGKGL |
| | Chain | EWIGRMRYSGDTSYSSALKSRVTISRDTSKNQVSLKLSSVTAADT |
| | | AVYYCTRDPMYIPGYSYGVMNAWGQGTTVTVSSASTKGPSVFPL |
| | | APSSKSTSGGTAALGCLVKDYFPEPVTVSWNSGALTSGVHTFPAV |
| | | LQSSGLYSLSSVVTVPSSSLGTQTYICNVNHKPSNTKVDKRVEPK |
| | | SCDKTHTCPPCPAPEAAGGPSVFLFPPKPKDTLMISRTPEVTCVV |
| | | VDVSHEDPEVKFNWYVDGVEVHNAKTKPREEQYNSTYRVVSVLT |
| | | VLHQDWLNGKEYKCKVSNKALPAPIEKTISKAKGQPREPQVYTLP |
| | | PSREEMTKNQVSLTCLVKGFYPSDIAVEWESNGQPENNYKTTPPV |
| | | LDSDGSFFLYSKLTVDKSRWQQGNVFSCSVMHEALHNHYTQKSL |
| | | SLSPGK |
| SEQ ID NO: 372 | DNA | CAGGTGCAGCTGCAGGAGTCCGGACCTGGACTGGTGAAGCCA |
| | Heavy | TCTGAGACCCTGAGCCTGACCTGCACAGTGAGCGGCTTCTCCC |
| | Chain | TGACCACATACAACATCCACTGGATCAGACAGCCACCTGGCAA |
| | | GGGACTGGAGTGGATCGGCCGGATGAGATACTCCGGCGACAC |
| | | ATCTTATAGCTCCGCCCTGAAGTCTAGGGTGACCATCAGCCGC |
| | | GATACATCCAAGAACCAGGTGAGCCTGAAGCTGTCTAGCGTGA |
| | | CCGCCGCCGACACAGCCGTGTACTATTGTACCCGGGACCCCAT |
| | | GTATATCCCCGGCTACTCTTATGGCGTGATGAATGCCTGGGGC |
| | | CAGGGCACCACAGTGACAGTGTCCTCTGCTAGCACCAAGGGC |
| | | CCATCGGTCTTCCCCCTGGCACCCTCCTCCAAGAGCACCTCTG |
| | | GGGGCACAGCGGCCCTGGGCTGCCTGGTCAAGGACTACTTCC |
| | | CCGAACCGGTGACGGTGTCGTGGAACTCAGGCGCCCTGACCA |
| | | GCGGCGTGCACACCTTCCCGGCTGTCCTACAGTCCTCAGGACT |
| | | CTACTCCCTCAGCAGCGTGGTGACCGTGCCCTCCAGCAGCTTG |
| | | GGCACCCAGACCTACATCTGCAACGTGAATCACAAGCCCAGCA |
| | | ACACCAAGGTGGACAAGAGAGTTGAGCCCAAATCTTGTGACAA |
| | | AACTCACACATGCCCACCGTGCCCAGCACCTGAAGCCGCTGG |
| | | GGGACCGTCAGTCTTCCTCTTCCCCCCAAAACCCAAGGACACC |
| | | CTCATGATCTCCCGGACCCCTGAGGTCACATGCGTGGTGGTGG |
| | | ACGTGAGCCACGAAGACCCTGAGGTCAAGTTCAACTGGTACGT |
| | | GGACGGCGTGGAGGTGCATAATGCCAAGACAAAGCCGCGGGA |
| | | GGAGCAGTACAACAGCACGTACCGTGTGGTCAGCGTCCTCACC |
| | | GTCCTGCACCAGGACTGGCTGAATGGCAAGGAGTACAAGTGCA |
| | | AGGTCTCCAACAAAGCCCTCCCAGCCCCCATCGAGAAAACCAT |
| | | CTCCAAAGCCAAAGGGCAGCCCCGAGAACCACAGGTGTACAC |
| | | CCTGCCCCCATCCCGGGAGGAGATGACCAAGAACCAGGTCAG |
| | | CCTGACCTGCCTGGTCAAAGGCTTCTATCCCAGCGACATCGCC |
| | | GTGGAGTGGGAGAGCAATGGGCAGCCGGAGAACAACTACAAG |
| | | ACCACGCCTCCCGTGCTGGACTCCGACGGCTCCTTCTTCCTCT |
| | | ACAGCAAGCTCACCGTGGACAAGAGCAGGTGGCAGCAGGGGA |
| | | ACGTCTTCTCATGCTCCGTGATGCATGAGGCTCTGCACAACCA |
| | | CTACACGCAGAAGAGCCTCTCCCTGTCTCCGGGTAAA |
| NOV580 LC | | |
| SEQ ID NO: 373 | LCDR1 | KTSQNIDKYLN |
| (Combined) | | |
| SEQ ID NO: 374 | LCDR2 | NTNNLEA |
| (Combined) | | |
| SEQ ID NO: 375 | LCDR3 | LQHRSSYT |
| (Combined) | | |
| SEQ ID NO: 376 | LCDR1 | KTSQNIDKYLN |
| (Kabat) | | |
| SEQ ID NO: 377 | LCDR2 | NTNNLEA |
| (Kabat) | | |
| SEQ ID NO: 378 | LCDR3 | LQHRSSYT |
| (Kabat) | | |
| SEQ ID NO: 379 | LCDR1 | SQNIDKY |
| (Chothia) | | |
| SEQ ID NO: 380 | LCDR2 | NTN |
| (Chothia) | | |
| SEQ ID NO: 381 | LCDR3 | HRSSY |
| (Chothia) | | |
| SEQ ID NO: 382 | LCDR1 | QNIDKY |
| (IMGT) | | |
| SEQ ID NO: 383 | LCDR2 | NTNNLEAGVP |
| (IMGT) | | |
| SEQ ID NO: 384 | LCDR3 | LQHRSSYT |
| (IMGT) | | |
| SEQ ID NO: 385 | VL | DIQMTQSPSSLSASVGDRVTITCKTSQNIDKYLNWYQQKPGKAPK |
| | | LLIYNTNNLEAGVPSRFSGSGSGTDYTFTISSLQPEDIATYFCLQHR |
| | | SSYTFGQGTKLEIK |
| SEQ ID NO: 386 | DNA VL | GACATCCAGATGACCCAGTCTCCAAGCTCCCTGAGCGCCTCCG |
| | | TGGGCGACAGGGTGACCATCACATGCAAGACAAGCCAGAACAT |
| | | CGATAAGTACCTGAATTGGTATCAGCAGAAGCCCGGCAAGGCC |
| | | CCTAAGCTGCTGATCTACAACACCAACAATCTGGAGGCAGGAG |
| | | TGCCATCCCGGTTCTCTGGCAGCGGCTCCGGAACCGACTATAC |
| | | CTTTACAATCTCTAGCCTGCAGCCCGAGGATATCGCCACATACT |
| | | TCTGTCTGCAGCACAGATCCTCTTATACCTTTGGCCAGGGCAC |
| | | AAAGCTGGAGATCAAG |
| SEQ ID NO: 387 | Light | DIQMTQSPSSLSASVGDRVTITCKTSQNIDKYLNWYQQKPGKAPK |
| | chain | LLIYNTNNLEAGVPSRFSGSGSGTDYTFTISSLQPEDIATYFCLQHR |
| | | SSYTFGQGTKLEIKRTVAAPSVFIFPPSDEQLKSGTASVVCLLNNF |
| | | YPREAKVQWKVDNALQSGNSQESVTEQDSKDSTYSLSSTLTLSK |
| | | ADYEKHKVYACEVTHQGLSSPVTKSFNRGEC |
| SEQ ID NO: 388 | DNA | GACATCCAGATGACCCAGTCTCCAAGCTCCCTGAGCGCCTCCG |
| | Light | TGGGCGACAGGGTGACCATCACATGCAAGACAAGCCAGAACAT |
| | Chain | CGATAAGTACCTGAATTGGTATCAGCAGAAGCCCGGCAAGGCC |
| | | CCTAAGCTGCTGATCTACAACACCAACAATCTGGAGGCAGGAG |
| | | TGCCATCCCGGTTCTCTGGCAGCGGCTCCGGAACCGACTATAC |
| | | CTTTACAATCTCTAGCCTGCAGCCCGAGGATATCGCCACATACT |
| | | TCTGTCTGCAGCACAGATCCTCTTATACCTTTGGCCAGGGCAC |
| | | AAAGCTGGAGATCAAGCGTACGGTGGCTGCACCATCTGTCTTC |
| | | ATCTTCCCGCCATCTGATGAGCAGTTGAAATCTGGAACTGCCTC |
| | | TGTTGTGTGCCTGCTGAATAACTTCTATCCCCGCGAGGCCAAA |
| | | GTACAGTGGAAGGTGGATAACGCCCTCCAATCGGGTAACTCCC |
| | | AGGAGAGTGTCACAGAGCAGGACAGCAAGGACAGCACCTACA |
| | | GCCTCAGCAGCACCCTGACGCTGAGCAAAGCAGACTACGAGA |
| | | AACACAAAGTCTACGCCTGCGAAGTCACCCATCAGGGCCTGAG |
| | | CTCGCCCGTCACAAAGAGCTTCAACCGCGGAGAGTGT |
| NOV567 HC | | |
| SEQ ID NO: 389 | HCDR1 | GFAFRKYGMS |
| (Combined) | | |
| SEQ ID NO: 390 | HCDR2 | LIYYDSSKMNYADTVKG |
| (Combined) | | |
| SEQ ID NO: 391 | HCDR3 | LNSEYD |
| (Combined) | | |
| SEQ ID NO: 392 | HCDR1 | KYGMS |
| (Kabat) | | |
| SEQ ID NO: 393 | HCDR2 | LIYYDSSKMNYADTVKG |
| (Kabat) | | |
| SEQ ID NO: 394 | HCDR3 | LNSEYD |
| (Kabat) | | |
| SEQ ID NO: 395 | HCDR1 | GFAFRKY |
| (Chothia) | | |
| SEQ ID NO: 396 | HCDR2 | YYDSSK |
| (Chothia) | | |
| SEQ ID NO: 397 | HCDR3 | LNSEYD |
| (Chothia) | | |
| SEQ ID NO: 398 | HCDR1 | GFAFRKYG |
| (IMGT) | | |
| SEQ ID NO: 399 | HCDR2 | IYYDSSKM |
| (IMGT) | | |
| SEQ ID NO: 400 | HCDR3 | AALNSEYD |
| (IMGT) | | |
| SEQ ID NO: 401 | VH | QVQLVESGGGVVQPGRSLRLSCAASGFAFRKYGMSWVRQAPGK |
| | | GLEWVALIYYDSSKMNYADTVKGRFTISRDNSKNTLYLQMNSLRA |
| | | EDTAVYYCAALNSEYDWGQGTMVTVSS |
| SEQ ID NO: 402 | DNA VH | CAGGTGCAGCTGGTGGAGTCTGGAGGAGGAGTGGTGCAGCCA |
| | | GGCCGGTCCCTGAGACTGTCTTGCGCCGCCAGCGGCTTCGCC |
| | | TTTCGGAAGTACGGAATGAGCTGGGTGAGGCAGGCACCTGGC |
| | | AAGGGACTGGAGTGGGTGGCCCTGATCTACTATGACAGCTCCA |
| | | AGATGAACTACGCCGATACCGTGAAGGGCAGGTTCACAATCTC |
| | | CCGCGACAACTCTAAGAATACCCTGTATCTGCAGATGAACAGC |
| | | CTGCGGGCCGAGGACACAGCCGTGTACTATTGTGCCGCCCTG |
| | | AATTCCGAGTATGATTGGGGCCAGGGCACCATGGTGACAGTGT |
| | | CTAGC |
| SEQ ID NO: 403 | Heavy | QVQLVESGGGVVQPGRSLRLSCAASGFAFRKYGMSWVRQAPG |
| | Chain | KGLEWVALIYYDSSKMNYADTVKGRFTISRDNSKNTLYLQMNSLR |
| | | AEDTAVYYCAALNSEYDWGQGTMVTVSSASTKGPSVFPLAPSSK |
| | | STSGGTAALGCLVKDYFPEPVTVSWNSGALTSGVHTFPAVLQSS |
| | | GLYSLSSVVTVPSSSLGTQTYICNVNHKPSNTKVDKRVEPKSCDK |
| | | THTCPPCPAPEAAGGPSVFLFPPKPKDTLMISRTPEVTCVVVDVS |
| | | HEDPEVKFNWYVDGVEVHNAKTKPREEQYNSTYRVVSVLTVLHQ |
| | | DWLNGKEYKCKVSNKALPAPIEKTISKAKGQPREPQVYTLPPSRE |
| | | EMTKNQVSLTCLVKGFYPSDIAVEWESNGQPENNYKTTPPVLDSD |
| | | GSFFLYSKLTVDKSRWQQGNVFSCSVMHEALHNHYTQKSLSLSP |
| | | GK |
| SEQ ID NO: 404 | DNA | CAGGTGCAGCTGGTGGAGTCTGGAGGAGGAGTGGTGCAGCC |
| | Heavy | AGGCCGGTCCCTGAGACTGTCTTGCGCCGCCAGCGGCTTCGC |
| | Chain | CTTTCGGAAGTACGGAATGAGCTGGGTGAGGCAGGCACCTGG |
| | | CAAGGGACTGGAGTGGGTGGCCCTGATCTACTATGACAGCTCC |
| | | AAGATGAACTACGCCGATACCGTGAAGGGCAGGTTCACAATCT |
| | | CCCGCGACAACTCTAAGAATACCCTGTATCTGCAGATGAACAG |
| | | CCTGCGGGCCGAGGACACAGCCGTGTACTATTGTGCCGCCCT |
| | | GAATTCCGAGTATGATTGGGGCCAGGGCACCATGGTGACAGTG |
| | | TCTAGCGCTAGCACCAAGGGCCCATCGGTCTTCCCCCTGGCAC |
| | | CCTCCTCCAAGAGCACCTCTGGGGGCACAGCGGCCCTGGGCT |
| | | GCCTGGTCAAGGACTACTTCCCCGAACCGGTGACGGTGTCGT |
| | | GGAACTCAGGCGCCCTGACCAGCGGCGTGCACACCTTCCCGG |
| | | CTGTCCTACAGTCCTCAGGACTCTACTCCCTCAGCAGCGTGGT |
| | | GACCGTGCCCTCCAGCAGCTTGGGCACCCAGACCTACATCTGC |
| | | AACGTGAATCACAAGCCCAGCAACACCAAGGTGGACAAGAGAG |
| | | TTGAGCCCAAATCTTGTGACAAAACTCACACATGCCCACCGTG |
| | | CCCAGCACCTGAAGCCGCTGGGGGACCGTCAGTCTTCCTCTTC |
| | | CCCCCAAAACCCAAGGACACCCTCATGATCTCCCGGACCCCTG |
| | | AGGTCACATGCGTGGTGGTGGACGTGAGCCACGAAGACCCTG |
| | | AGGTCAAGTTCAACTGGTACGTGGACGGCGTGGAGGTGCATAA |
| | | TGCCAAGACAAAGCCGCGGGAGGAGCAGTACAACAGCACGTA |
| | | CCGTGTGGTCAGCGTCCTCACCGTCCTGCACCAGGACTGGCT |
| | | GAATGGCAAGGAGTACAAGTGCAAGGTCTCCAACAAAGCCCTC |
| | | CCAGCCCCCATCGAGAAAACCATCTCCAAAGCCAAAGGGCAGC |
| | | CCCGAGAACCACAGGTGTACACCCTGCCCCCATCCCGGGAGG |
| | | AGATGACCAAGAACCAGGTCAGCCTGACCTGCCTGGTCAAAGG |
| | | CTTCTATCCCAGCGACATCGCCGTGGAGTGGGAGAGCAATGG |
| | | GCAGCCGGAGAACAACTACAAGACCACGCCTCCCGTGCTGGA |
| | | CTCCGACGGCTCCTTCTTCCTCTACAGCAAGCTCACCGTGGAC |
| | | AAGAGCAGGTGGCAGCAGGGGAACGTCTTCTCATGCTCCGTG |
| | | ATGCATGAGGCTCTGCACAACCACTACACGCAGAAGAGCCTCT |
| | | CCCTGTCTCCGGGTAAA |
| NOV567 LC | | |
| SEQ ID NO: 405 | LCDR1 | RGSQSIGNSLN |
| (Combined) | | |
| SEQ ID NO: 406 | LCDR2 | STSTLEY |
| (Combined) | | |
| SEQ ID NO: 407 | LCDR3 | LQYATYPYT |
| (Combined) | | |
| SEQ ID NO: 408 | LCDR1 | RGSQSIGNSLN |
| (Kabat) | | |
| SEQ ID NO: 409 | LCDR2 | STSTLEY |
| (Kabat) | | |
| SEQ ID NO: 410 | LCDR3 | LQYATYPYT |
| (Kabat) | | |
| SEQ ID NO: 411 | LCDR1 | SQSIGNS |
| (Chothia) | | |
| SEQ ID NO: 412 | LCDR2 | STS |
| (Chothia) | | |
| SEQ ID NO: 413 | LCDR3 | YATYPY |
| (Chothia) | | |
| SEQ ID NO: 414 | LCDR1 | QSIGNS |
| (IMGT) | | |
| SEQ ID NO: 415 | LCDR2 | STSTLEYGVP |
| (IMGT) | | |
| SEQ ID NO: 416 | LCDR3 | LQYATYPYT |
| (IMGT) | | |
| SEQ ID NO: 417 | VL | DIQMTQSPSSLSASVGDRVTITCRGSQSIGNSLNWYQQKPGKAPK |
| | | RLIYSTSTLEYGVPSRFSGSGSGTEYTLTISSLQPEDFATYYCLQY |
| | | ATYPYTFGQGTKLEIK |
| SEQ ID NO: 418 | DNA VL | GACATCCAGATGACCCAGTCCCCTAGCTCCCTGTCCGCCTCTG |
| | | TGGGCGATAGGGTGACCATCACATGCAGAGGCAGCCAGTCCA |
| | | TCGGCAACTCTCTGAATTGGTACCAGCAGAAGCCCGGCAAGGC |
| | | CCCTAAGAGGCTGATCTACTCTACCAGCACACTGGAGTATGGA |
| | | GTGCCATCCCGGTTCTCCGGCTCTGGCAGCGGAACCGAGTAC |
| | | ACCCTGACAATCTCTAGCCTGCAGCCAGAGGACTTCGCCACAT |
| | | ACTATTGTCTGCAGTATGCCACCTACCCCTATACATTTGGCCAG |
| | | GGCACAAAGCTGGAGATCAAG |
| SEQ ID NO: 419 | Light | DIQMTQSPSSLSASVGDRVTITCRGSQSIGNSLNWYQQKPGKAPK |
| | chain | RLIYSTSTLEYGVPSRFSGSGSGTEYTLTISSLQPEDFATYYCLQY |
| | | ATYPYTFGQGTKLEIKRTVAAPSVFIFPPSDEQLKSGTASVVCLLN |
| | | NFYPREAKVQWKVDNALQSGNSQESVTEQDSKDSTYSLSSTLTL |
| | | SKADYEKHKVYACEVTHQGLSSPVTKSFNRGEC |
| SEQ ID NO: 420 | DNA | GACATCCAGATGACCCAGTCCCCTAGCTCCCTGTCCGCCTCTG |
| | Light | TGGGCGATAGGGTGACCATCACATGCAGAGGCAGCCAGTCCA |
| | Chain | TCGGCAACTCTCTGAATTGGTACCAGCAGAAGCCCGGCAAGGC |
| | | CCCTAAGAGGCTGATCTACTCTACCAGCACACTGGAGTATGGA |
| | | GTGCCATCCCGGTTCTCCGGCTCTGGCAGCGGAACCGAGTAC |
| | | ACCCTGACAATCTCTAGCCTGCAGCCAGAGGACTTCGCCACAT |
| | | ACTATTGTCTGCAGTATGCCACCTACCCCTATACATTTGGCCAG |
| | | GGCACAAAGCTGGAGATCAAGCGTACGGTGGCTGCACCATCT |
| | | GTCTTCATCTTCCCGCCATCTGATGAGCAGTTGAAATCTGGAAC |
| | | TGCCTCTGTTGTGTGCCTGCTGAATAACTTCTATCCCCGCGAG |
| | | GCCAAAGTACAGTGGAAGGTGGATAACGCCCTCCAATCGGGTA |
| | | ACTCCCAGGAGAGTGTCACAGAGCAGGACAGCAAGGACAGCA |
| | | CCTACAGCCTCAGCAGCACCCTGACGCTGAGCAAAGCAGACTA |
| | | CGAGAAACACAAAGTCTACGCCTGCGAAGTCACCCATCAGGGC |
| | | CTGAGCTCGCCCGTCACAAAGAGCTTCAACCGCGGAGAGTGT |
| NOV221 HC | | |
| SEQ ID NO: 421 | HCDR1 | GFSLTTYNIH |
| (Combined) | | |
| SEQ ID NO: 422 | HCDR2 | RMRYSGDTSYSSALKS |
| (Combined) | | |
| SEQ ID NO: 423 | HCDR3 | DPMYIPGYSYGVMNA |
| (Combined) | | |
| SEQ ID NO: 424 | HCDR1 | TYNIH |
| (Kabat) | | |
| SEQ ID NO: 425 | HCDR2 | RMRYSGDTSYSSALKS |
| (Kabat) | | |
| SEQ ID NO: 426 | HCDR3 | DPMYIPGYSYGVMNA |
| (Kabat) | | |
| SEQ ID NO: 427 | HCDR1 | GFSLTTY |
| (Chothia) | | |
| SEQ ID NO: 428 | HCDR2 | RYSGD |
| (Chothia) | | |
| SEQ ID NO: 429 | HCDR3 | DPMYIPGYSYGVMNA |
| (Chothia) | | |
| SEQ ID NO: 430 | HCDR1 | GFSLTTYN |
| (IMGT) | | |
| SEQ ID NO: 431 | HCDR2 | MRYSGDT |
| (IMGT) | | |
| SEQ ID NO: 432 | HCDR3 | TRDPMYIPGYSYGVMNA |
| (IMGT) | | |
| SEQ ID NO: 433 | VH | QVQLQESGPGLVKPSETLSLTCTVSGFSLTTYNIHWIRQPPGKGLE |
| | | WIGRMRYSGDTSYSSALKSRVTISRDTSKNQVSLKLSSVTAADTA |
| | | VYYCTRDPMYIPGYSYGVMNAWGQGTTVTVSS |
| SEQ ID NO: 434 | DNA VH | CAGGTGCAGCTGCAGGAGTCCGGACCTGGACTGGTGAAGCCA |
| | | TCTGAGACCCTGAGCCTGACCTGCACAGTGAGCGGCTTCTCCC |
| | | TGACCACATACAACATCCACTGGATCAGACAGCCACCTGGCAA |
| | | GGGACTGGAGTGGATCGGCCGGATGAGATACTCCGGCGACAC |
| | | ATCTTATAGCTCCGCCCTGAAGTCTAGGGTGACCATCAGCCGC |
| | | GATACATCCAAGAACCAGGTGAGCCTGAAGCTGTCTAGCGTGA |
| | | CCGCCGCCGACACAGCCGTGTACTATTGTACCCGGGACCCCAT |
| | | GTATATCCCCGGCTACTCTTATGGCGTGATGAATGCCTGGGGC |
| | | CAGGGCACCACAGTGACAGTGTCCTCT |
| SEQ ID NO: 435 | Heavy | QVQLQESGPGLVKPSETLSLTCTVSGFSLTTYNIHWIRQPPGKGL |
| | Chain | EWIGRMRYSGDTSYSSALKSRVTISRDTSKNQVSLKLSSVTAADT |
| | | AVYYCTRDPMYIPGYSYGVMNAWGQGTTVTVSSASTKGPSVFPL |
| | | APSSKSTSGGTAALGCLVKDYFPEPVTVSWNSGALTSGVHTFPAV |
| | | LQSSGLYSLSSVVTVPSSSLGTQTYICNVNHKPSNTKVDKRVEPK |
| | | SCDKTHTCPPCPAPEAAGGPSVFLFPPKPKDTLMISRTPEVTCVV |
| | | VDVSHEDPEVKFNWYVDGVEVHNAKTKPREEQYNSTYRVVSVLT |
| | | VLHQDWLNGKEYKCKVSNKALPAPIEKTISKAKGQPREPQVYTLP |
| | | PSREEMTKNQVSLTCLVKGFYPSDIAVEWESNGQPENNYKTTPPV |
| | | LDSDGSFFLYSKLTVDKSRWQQGNVFSCSVMHEALHNHYTQKSL |
| | | SLSPGK |
| SEQ ID NO: 436 | DNA | CAGGTGCAGCTGCAGGAGTCCGGACCTGGACTGGTGAAGCCA |
| | Heavy | TCTGAGACCCTGAGCCTGACCTGCACAGTGAGCGGCTTCTCCC |
| | Chain | TGACCACATACAACATCCACTGGATCAGACAGCCACCTGGCAA |
| | | GGGACTGGAGTGGATCGGCCGGATGAGATACTCCGGCGACAC |
| | | ATCTTATAGCTCCGCCCTGAAGTCTAGGGTGACCATCAGCCGC |
| | | GATACATCCAAGAACCAGGTGAGCCTGAAGCTGTCTAGCGTGA |
| | | CCGCCGCCGACACAGCCGTGTACTATTGTACCCGGGACCCCAT |
| | | GTATATCCCCGGCTACTCTTATGGCGTGATGAATGCCTGGGGC |
| | | CAGGGCACCACAGTGACAGTGTCCTCTGCTAGCACCAAGGGC |
| | | CCATCGGTCTTCCCCCTGGCACCCTCCTCCAAGAGCACCTCTG |
| | | GGGGCACAGCGGCCCTGGGCTGCCTGGTCAAGGACTACTTCC |
| | | CCGAACCGGTGACGGTGTCGTGGAACTCAGGCGCCCTGACCA |
| | | GCGGCGTGCACACCTTCCCGGCTGTCCTACAGTCCTCAGGACT |
| | | CTACTCCCTCAGCAGCGTGGTGACCGTGCCCTCCAGCAGCTTG |
| | | GGCACCCAGACCTACATCTGCAACGTGAATCACAAGCCCAGCA |
| | | ACACCAAGGTGGACAAGAGAGTTGAGCCCAAATCTTGTGACAA |
| | | AACTCACACATGCCCACCGTGCCCAGCACCTGAAGCCGCTGG |
| | | GGGACCGTCAGTCTTCCTCTTCCCCCCAAAACCCAAGGACACC |
| | | CTCATGATCTCCCGGACCCCTGAGGTCACATGCGTGGTGGTGG |
| | | ACGTGAGCCACGAAGACCCTGAGGTCAAGTTCAACTGGTACGT |
| | | GGACGGCGTGGAGGTGCATAATGCCAAGACAAAGCCGCGGGA |
| | | GGAGCAGTACAACAGCACGTACCGTGTGGTCAGCGTCCTCACC |
| | | GTCCTGCACCAGGACTGGCTGAATGGCAAGGAGTACAAGTGCA |
| | | AGGTCTCCAACAAAGCCCTCCCAGCCCCCATCGAGAAAACCAT |
| | | CTCCAAAGCCAAAGGGCAGCCCCGAGAACCACAGGTGTACAC |
| | | CCTGCCCCCATCCCGGGAGGAGATGACCAAGAACCAGGTCAG |
| | | CCTGACCTGCCTGGTCAAAGGCTTCTATCCCAGCGACATCGCC |
| | | GTGGAGTGGGAGAGCAATGGGCAGCCGGAGAACAACTACAAG |
| | | ACCACGCCTCCCGTGCTGGACTCCGACGGCTCCTTCTTCCTCT |
| | | ACAGCAAGCTCACCGTGGACAAGAGCAGGTGGCAGCAGGGGA |
| | | ACGTCTTCTCATGCTCCGTGATGCATGAGGCTCTGCACAACCA |
| | | CTACACGCAGAAGAGCCTCTCCCTGTCTCCGGGTAAA |
| NOV221 LC | | |
| SEQ ID NO: 437 | LCDR1 | KSSQNIDKYLN |
| (Combined) | | |
| SEQ ID NO: 438 | LCDR2 | NTNNLEA |
| (Combined) | | |
| SEQ ID NO: 439 | LCDR3 | LQHRSGYT |
| (Combined) | | |
| SEQ ID NO: 440 | LCDR1 | KSSQNIDKYLN |
| (Kabat) | | |
| SEQ ID NO: 441 | LCDR2 | NTNNLEA |
| (Kabat) | | |
| SEQ ID NO: 442 | LCDR3 | LQHRSGYT |
| (Kabat) | | |
| SEQ ID NO: 443 | LCDR1 | SQNIDKY |
| (Chothia) | | |
| SEQ ID NO: 444 | LCDR2 | NTN |
| (Chothia) | | |
| SEQ ID NO: 445 | LCDR3 | HRSGY |
| (Chothia) | | |
| SEQ ID NO: 446 | LCDR1 | QNIDKY |
| (IMGT) | | |
| SEQ ID NO: 447 | LCDR2 | NTNNLEAGVP |
| (IMGT) | | |
| SEQ ID NO: 448 | LCDR3 | LQHRSGYT |
| (IMGT) | | |
| SEQ ID NO: 449 | VL | DIQMTQSPSSLSASVGDRVTITCKSSQNIDKYLNWYQQKPGKAPK |
| | | LLIYNTNNLEAGVPSRFSGSGSGTDYTFTISSLQPEDIATYFCLQHR |
| | | SGYTFGQGTKLEIK |
| SEQ ID NO: 450 | DNA VL | GGATCCACCGGCGACATCCAGATGACCCAGTCCCCAAGCTCC |
| | | CTGAGCGCCTCCGTGGGCGACCGGGTGACCATCACATGCAAG |
| | | TCTAGCCAGAACATCGATAAGTACCTGAATTGGTATCAGCAGAA |
| | | GCCCGGCAAGGCCCCTAAGCTGCTGATCTACAACACAAACAAT |
| | | CTGGAGGCCGGCGTGCCATCTCGGTTCTCTGGCAGCGGCTCC |
| | | GGAACCGACTATACCTTTACAATCTCCTCTCTGCAGCCCGAGG |
| | | ATATCGCCACATACTTCTGTCTGCAGCACAGAAGCGGCTATAC |
| | | CTTTGGCCAGGGCACAAAGCTGGAGATCAAGCGTACG |
| SEQ ID NO: 451 | Light | DIQMTQSPSSLSASVGDRVTITCKSSQNIDKYLNWYQQKPGKAPK |
| | chain | LLIYNTNNLEAGVPSRFSGSGSGTDYTFTISSLQPEDIATYFCLQHR |
| | | SGYTFGQGTKLEIKRTVAAPSVFIFPPSDEQLKSGTASVVCLLNNF |
| | | YPREAKVQWKVDNALQSGNSQESVTEQDSKDSTYSLSSTLTLSK |
| | | ADYEKHKVYACEVTHQGLSSPVTKSFNRGEC |
| SEQ ID NO: 452 | DNA | GGATCCACCGGCGACATCCAGATGACCCAGTCCCCAAGCTCC |
| | Light | CTGAGCGCCTCCGTGGGCGACCGGGTGACCATCACATGCAAG |
| | Chain | TCTAGCCAGAACATCGATAAGTACCTGAATTGGTATCAGCAGAA |
| | | GCCCGGCAAGGCCCCTAAGCTGCTGATCTACAACACAAACAAT |
| | | CTGGAGGCCGGCGTGCCATCTCGGTTCTCTGGCAGCGGCTCC |
| | | GGAACCGACTATACCTTTACAATCTCCTCTCTGCAGCCCGAGG |
| | | ATATCGCCACATACTTCTGTCTGCAGCACAGAAGCGGCTATAC |
| | | CTTTGGCCAGGGCACAAAGCTGGAGATCAAGCGTACGCGTAC |
| | | GGTGGCTGCACCATCTGTCTTCATCTTCCCGCCATCTGATGAG |
| | | CAGTTGAAATCTGGAACTGCCTCTGTTGTGTGCCTGCTGAATAA |
| | | CTTCTATCCCCGCGAGGCCAAAGTACAGTGGAAGGTGGATAAC |
| | | GCCCTCCAATCGGGTAACTCCCAGGAGAGTGTCACAGAGCAG |
| | | GACAGCAAGGACAGCACCTACAGCCTCAGCAGCACCCTGACG |
| | | CTGAGCAAAGCAGACTACGAGAAACACAAAGTCTACGCCTGCG |
| | | AAGTCACCCATCAGGGCCTGAGCTCGCCCGTCACAAAGAGCTT |
| | | CAACCGCGGAGAGTGT |

### 8.2. Example 2: Binding of CD-3 Antibodies

[0785] Binding affinity interaction (KD) of the anti-CD3 antibodies was determined utilizing surface plasma resonance (SPR) technology. CD3 protein was immobilized onto a Series S CM5 sensor chip and antibody flowed over in 2 fold serial dilutions to assess binding utilizing the Biacore T200 instrument (GE Heathcare, Cat #28975001, Pittsburgh, Pa.). The KD was determined by fitting the plot with a 1:1 fit model (O'Shannessy et al. Anal. Biochem 1993; 212: 457-468; Karlsson, Fält J. Immunol. Methods. 1997; 200: 121-133). This SPR data is shown in FIGS. 4A-4D. This figure shows that NOV292 (FIG. 4A) and NOV123 (FIG. 4C) are efficient binders and comparable with the SP34 positive control in FIG. 4B. The SP1C antibody in FIG. 4D is a rat parental antibody that has not been humanized.

[0786] Binding activity (EC50) of the anti-CD3 antibodies with the human CD3 or cynomolgus monkey CD3 stably expressed in CHO cell lines were determined utilizing flow cytometry (FACS) technology. Human CD3 stably expressed CHO cell line (hCD3-CHO) was kept in RPMI 1640 culture medium (Gibco, Cat #11875119) plus 10% FBS (Gibco, Cat #10099141) and 1 mg/ml G418 (Gibco, Cat #10131035), while the cyno CD3 stably expressed CHO cell line (cynoCD3-CHO) was maintained in RPMI 1640 culture medium plus 10% FBS, 250 ug/ml Zeocin (Gibco, Cat #R25005) and 1 mg/ml G418. For FACS, the culture media was removed, and the cells were washed once with 1×PBS (Gibco, Cat #10099-041). The PBS was aspirated the cells were resuspended in 5 mM EDTA PBS. The cells were counted and diluted in 0.2% BSA PBS. The cells were transferred to U bottom 96 plates (1×106 per well). Cells were pelleted and re-suspended with serially diluted antibodies. An anti-huCD3 SP34 xiII IgG1-LALA antibody made in-house was used a positive control. Antibodies were incubated with the cells for 30 min, then 200 μl of cold PBS+1% FBS was added and cells pelleted. The cells were then counter stained with 50 μl of 1 μg/ml anti-human A647 detection antibody (Jacson ImmunoResearch, Cat #115-606-071) in cold PBS+1% FBS. The cells were incubated for 20 min at 4° C. and then 200 μl of cold PBS+1% FBS was added and cells were subjected to FACS analysis on a Guava 8™ instrument or BD Fortessa™ instrument. Original data were analyzed by Flowjo software, and this data is shown in FIGS. 5-10. This data shows that the antibodies disclosed herein bind to both human and cyno CD3 with values similar to the SP34 positive control.

### 8.3. Example 3: Activation of JNL Cells by Anti-CD3 Agonist Antibodies

[0787] Jurkat NFAT Luciferase (JNL) cells were cultured in RPMI1640 medium plus 10% FBS, 2 mM Glutamax (Gibco, Cat #35050061) and 0.5 μg/ml Puromycin (Gibco, Cat #A1113802). Plates were coated with serial diluted antibodies and incubate at 37° C. for 1 hour. After incubation, the plates were washed with 200 μl wash buffer (PBS+1% FBS), then 100 μl of the prepared JNL cells (2.5×10⁵cells/mL) were added to all wells. The cells were incubated at 37° C., 5% CO2 for 14h-16h. The plates were removed from the incubator and 100 μl of One-glo reagent (Promega, Cat #E6120) was added. The reagent was incubated for 3 minutes at room temperature, then placed in a light sealed dark box for 10 minutes at room temperature. The samples were transferred to a solid white bottom tissue culture plate and data was analyzed using the Envision Plate Reader (Perkin Elmer, Cat #2105-0010, Bridgeville Pa.). The results are shown in FIGS. 11-15. This data demonstrates that the antibodies disclosed herein displayed the same activity in the JNL cell assay as SP34.

### 8.4. Example 4: Production of Anti-CD3-Anti-CD19 IgG1 Bispecific Antibodies in Knob-into-Holes Format

[0788] Gene synthesis for all constructs was performed and codon optimized for expression in mammalian cells. For bispecific constructs, anti-CD19 heavy chains were synthesized as fusions of the variable domains to constant human IgG1 domains containing mutations for the hole to facilitate heterodimerization as well as N297A Fc silencing mutation. Anti-CD19 light chain plasmids were also synthesized for expression. The anti-CD3 arm was produced as single chain fragment variable fused to constant human IgG1 domains containing mutations for the knob to facilitate heterodimerization as well as the N297A Fc silencing mutation. Bispecific antibodies were co-expressed transiently in HEK293 cells. The transfection was performed using PEI as the transfection reagent. For small scale (<5 L) transfections, cells were grown in shake flasks on an orbital shaker (115 rpm) in a humidified incubator (85%) at 5% CO2. Light and heavy chain plasmids for tumor antigen arms were combined with anti-CD3 plasmid with PEI at a final ratio of 1 DNA:3 PEI. 1 mg/L culture of plasmid was used for transfection at 2.0 million cells/ml. After 5 days of expression, the antibody was harvested by clarification of the media via centrifugation and filtration. Purification was performed via anti-CH1 affinity batch binding (CaptureSelect IgG-CH1 Affinity Matrix, Thermo-Fisher Scientific, Waltham, Mass., USA) or Protein A (rProteinA Sepharose, Fast flow, GE Healthcare, Uppsala, Sweden) batch binding using 1 ml resin/100 ml supernatant. The protein was allowed to bind for a minimum of 2 hours with gentle mixing, and the supernatant loaded onto a gravity filtration column. The resin was washed with 20-50 CV of PBS. Antibody was eluted with 20 CV of 50 mM citrate, 90 mM NaCl pH 3.2. 50 mM sucrose. The eluted IgG protein was adjusted to pH 5.5 with 1 M sodium citrate 50 mM sucrose. If the antibody contained aggregates, preparative size exclusion chromatography was performed using Hi Load 16/60 Superdex 200 grade column (GE Healthcare Life Sciences, Uppsala, Sweden) as a final polishing step. To confirm that the identity of the proteins expressed matched the predicted masses for the primary amino acid sequences from Seq ID No: 453-461 below, bispecific proteins were analyzed by high-performance liquid chromatography coupled to mass spectrometry.

TABLE 20

| | | |
|---|---|---|
| CD19-CD3 | | |
| bispecific control | | |
| SEQ ID NO: | CD19 light | EIVMTQSPATLSLSPGERATLSCRASQDISKYLNW |
| 453 | chain | YQQKPGQAPRLLIYHTSRLHSGIPARFSGSGSGTD |
| | | YTLTISSLQPEDFAVYFCQQGNTLPYTFGQGTKLEI |
| | | KRTVAAPSVFIFPPSDEQLKSGTASVVCLLNNFYP |
| | | REAKVQWKVDNALQSGNSQESVTEQDSKDSTYSL |
| | | SSTLTLSKADYEKHKVYACEVTHQGLSSPVTKSFN |
| | | RGEC |
| SEQ ID NO: | CD19 | QVQLQESGPGLVKPSETLSLTCTVSGVSLPDYGVS |
| 454 | heavy | WIRQPPGKGLEWIGVIWGSETTYYQSSLKSRVTIS |
| | chain | KDNSKNQVSLKLSSVTAADTAVYYCAKHYYYGGS |
| | | YAMDYWGQGTLVTVSSASTKGPSVFPLAPSSKST |
| | | SGGTAALGCLVKDYFPEPVTVSWNSGALTSGVHT |
| | | FPAVLQSSGLYSLSSVVTVPSSSLGTQTYICNVNH |
| | | KPSNTKVDKRVEPKSCDKTHTCPPCPAPELLGGP |
| | | SVFLFPPKPKDTLMISRTPEVTCVVVDVSHEDPEV |
| | | KFNWYVDGVEVHNAKTKPREEQYASTYRVVSVLT |
| | | VLHQDWLNGKEYKCKVSNKALPAPIEKTISKAKGQ |
| | | PREPQVCTLPPSREEMTKNQVSLSCAVKGFYPSDI |
| | | AVEWESNGQPENNYKTTPPVLDSDGSFFLVSKLT |
| | | VDKSRWQQGNVFSCSVMHEALHNHYTQKSLSLS |
| | | PGK |
| SEQ ID NO: | CD3 scFv | EVQLVESGGGLVQPGGSLKLSCAASGFTFNTYAM |
| 455 | heavy | NWVRQASGKGLEWVGRIRSKYNNYATYYADSVK |
| | chain | DRFTISRDDSKSTLYLQMNSLKTEDTAVYYCVRHG |
| | | NFGNSYVSWFAYWGQGTLVTVSSGGGGSGGGG |
| | | SGGGGSGGGGSQAVVTQEPSLTVSPGGTVTLTC |
| | | RSSTGAVTTSNYANWVQQKPGQAPRGLIGGTNKR |
| | | APWTPARFSGSLLGDKAALTLSGAQPEDEAEYFC |
| | | ALWYSNLWVFGGGTKLTVLGGGGSDKTHTCPPC |
| | | PAPELLGGPSVFLFPPKPKDTLMISRTPEVTCVVVD |
| | | VSHEDPEVKFNWYVDGVEVHNAKTKPREEQYAST |
| | | YRVVSVLTVLHQDWLNGKEYKCKVSNKALPAPIEK |
| | | TISKAKGQPREPQVYTLPPCREEMTKNQVSLWCL |
| | | VKGFYPSDIAVEWESNGQPENNYKTTPPVLDSDG |
| | | SFFLYSKLTVDKSRWQQGNVFSCSVMHEALHNHY |
| | | TQKSLSLSPGK |
| CD19-CD3 | | |
| bispecific 1 | | |
| (Rat, sp10b) | | |
| SEQ ID NO: 453 | CD19 light | EIVMTQSPATLSLSPGERATLSCRASQDISKYLNW |
| | chain | YQQKPGQAPRLLIYHTSRLHSGIPARFSGSGSGTD |
| | | YTLTISSLQPEDFAVYFCQQGNTLPYTFGQGTKLEI |
| | | KRTVAAPSVFIFPPSDEQLKSGTASVVCLLNNFYP |
| | | REAKVQWKVDNALQSGNSQESVTEQDSKDSTYSL |
| | | SSTLTLSKADYEKHKVYACEVTHQGLSSPVTKSFN |
| | | RGEC |
| SEQ ID NO: 454 | CD19 | QVQLQESGPGLVKPSETLSLTCTVSGVSLPDYGVS |
| | heavy | WIRQPPGKGLEWIGVIWGSETTYYQSSLKSRVTIS |
| | chain | KDNSKNQVSLKLSSVTAADTAVYYCAKHYYYGGS |
| | | YAMDYWGQGTLVTVSSASTKGPSVFPLAPSSKST |
| | | SGGTAALGCLVKDYFPEPVTVSWNSGALTSGVHT |
| | | FPAVLQSSGLYSLSSVVTVPSSSLGTQTYICNVNH |
| | | KPSNTKVDKRVEPKSCDKTHTCPPCPAPELLGGP |
| | | SVFLFPPKPKDTLMISRTPEVTCVVVDVSHEDPEV |
| | | KFNWYVDGVEVHNAKTKPREEQYASTYRVVSVLT |
| | | VLHQDWLNGKEYKCKVSNKALPAPIEKTISKAKGQ |
| | | PREPQVCTLPPSREEMTKNQVSLSCAVKGFYPSDI |
| | | AVEWESNGQPENNYKTTPPVLDSDGSFFLVSKLT |
| | | VDKSRWQQGNVFSCSVMHEALHNHYTQKSLSLS |
| | | PGK |
| SEQ ID NO: 456 | CD3 scFv | QVQLHQSGAELAKPGTSVNLSCKASGYTFTSYYIY |
| | heavy | WIKRRPGQGLEWIGYIYPGHDAIYYSENFKGKATF |
| | chain | TADTSSSTAYMLLGSLTPEDSAYYFCVRPNTMMA |
| | | PLAYWGQGTLVTVSSGGGGSGGGGSGGGGSGG |
| | | GGSVVVLTQTPVSLPVSLGGQASISCRSSQSLIYSI |
| | | GNTYLHWYLQKPGQSPQLLIYRVSNRFSGVPDRF |
| | | SGSGSGTDFTLKISRVEPEDLGDYYCFQSTHLPYT |
| | | FGAGTKLELKGGGGSGGGGSDKTHTCPPCPAPEL |
| | | LGGPSVFLFPPKPKDTLMISRTPEVTCVVVDVSHE |
| | | DPEVKFNWYVDGVEVHNAKTKPREEQYNSTYRVV |
| | | SVLTVLHQDWLNGKEYKCKVSNKALPAPIEKTISKA |
| | | KGQPREPQVYTLPPCREEMTKNQVSLWCLVKGFY |
| | | PSDIAVEWESNGQPENNYKTTPPVLDSDGSFFLYS |
| | | KLTVDKSRWQQGNVFSCSVMHEALHNRYTQKSLS |
| | | LSPGK |
| CD19-CD3 | | |
| bispecific 2 | | |
| (NOV110) | | |
| SEQ ID NO: 453 | CD19 light | EIVMTQSPATLSLSPGERATLSCRASQDISKYLNW |
| | chain | YQQKPGQAPRLLIYHTSRLHSGIPARFSGSGSGTD |
| | | YTLTISSLQPEDFAVYFCQQGNTLPYTFGQGTKLEI |
| | | KRTVAAPSVFIFPPSDEQLKSGTASVVCLLNNFYP |
| | | REAKVQWKVDNALQSGNSQESVTEQDSKDSTYSL |
| | | SSTLTLSKADYEKHKVYACEVTHQGLSSPVTKSFN |
| | | RGEC |
| SEQ ID NO: 454 | CD19 | QVQLQESGPGLVKPSETLSLTCTVSGVSLPDYGVS |
| | heavy | WIRQPPGKGLEWIGVIWGSETTYYQSSLKSRVTIS |
| | chain | KDNSKNQVSLKLSSVTAADTAVYYCAKHYYYGGS |
| | | YAMDYWGQGTLVTVSSASTKGPSVFPLAPSSKST |
| | | SGGTAALGCLVKDYFPEPVTVSWNSGALTSGVHT |
| | | FPAVLQSSGLYSLSSVVTVPSSSLGTQTYICNVNH |
| | | KPSNTKVDKRVEPKSCDKTHTCPPCPAPELLGGP |
| | | SVFLFPPKPKDTLMISRTPEVTCVVVDVSHEDPEV |
| | | KFNWYVDGVEVHNAKTKPREEQYASTYRVVSVLT |
| | | VLHQDWLNGKEYKCKVSNKALPAPIEKTISKAKGQ |
| | | PREPQVCTLPPSREEMTKNQVSLSCAVKGFYPSDI |
| | | AVEWESNGQPENNYKTTPPVLDSDGSFFLVSKLT |
| | | VDKSRWQQGNVFSCSVMHEALHNHYTQKSLSLS |
| | | PGK |
| SEQ ID NO: 457 | CD3 scFv | QVQLVQSGAEVKKPGASVKVSCKASGYTFTSYYIY |
| | heavy | WVRQAPGQRLEWMGYIYPANGGIYYSEKFKGRVT |
| | chain | ITADTSAGTAYMELSSLRSEDTAVYYCARPVTMMA |
| | | PLVFWGQGTLVTVSSGGGGSGGGGSGGGGSGG |
| | | GGSDVVMTQSPLSLPVTLGQPASISCRSSQSLVYS |
| | | HGNTYLHWYQQRPGQSPRLLIYRVSNRFSGVPDR |
| | | FSGSGSGTDFTLKISRVEAEDVGVYYCFQSTHLPY |
| | | TFGQGTKLEIKGSDKTHTCPPCPAPELLGGPSVFL |
| | | FPPKPKDTLMISRTPEVTCVVVDVSHEDPEVKFNW |
| | | YVDGVEVHNAKTKPREEQYASTYRVVSVLTVLHQ |
| | | DWLNGKEYKCKVSNKALPAPIEKTISKAKGQPREP |
| | | QVYTLPPCREEMTKNQVSLWCLVKGFYPSDIAVE |
| | | WESNGQPENNYKTTPPVLDSDGSFFLYSKLTVDK |
| | | SRWQQGNVFSCSVMHEALHNRYTQKSLSLSPGK |
| CD19-CD3 | | |
| bispecific 3 | | |
| (NOV567) | | |
| SEQ ID NO: 453 | CD19 light | EIVMTQSPATLSLSPGERATLSCRASQDISKYLNW |
| | chain | YQQKPGQAPRLLIYHTSRLHSGIPARFSGSGSGTD |
| | | YTLTISSLQPEDFAVYFCQQGNTLPYTFGQGTKLEI |
| | | KRTVAAPSVFIFPPSDEQLKSGTASVVCLLNNFYP |
| | | REAKVQWKVDNALQSGNSQESVTEQDSKDSTYSL |
| | | SSTLTLSKADYEKHKVYACEVTHQGLSSPVTKSFN |
| | | RGEC |
| SEQ ID NO: 454 | CD19 | QVQLQESGPGLVKPSETLSLTCTVSGVSLPDYGVS |
| | heavy | WIRQPPGKGLEWIGVIWGSETTYYQSSLKSRVTIS |
| | chain | KDNSKNQVSLKLSSVTAADTAVYYCAKHYYYGGS |
| | | YAMDYWGQGTLVTVSSASTKGPSVFPLAPSSKST |
| | | SGGTAALGCLVKDYFPEPVTVSWNSGALTSGVHT |
| | | FPAVLQSSGLYSLSSVVTVPSSSLGTQTYICNVNH |
| | | KPSNTKVDKRVEPKSCDKTHTCPPCPAPELLGGP |
| | | SVFLFPPKPKDTLMISRTPEVTCVVVDVSHEDPEV |
| | | KFNWYVDGVEVHNAKTKPREEQYASTYRVVSVLT |
| | | VLHQDWLNGKEYKCKVSNKALPAPIEKTISKAKGQ |
| | | PREPQVCTLPPSREEMTKNQVSLSCAVKGFYPSDI |
| | | AVEWESNGQPENNYKTTPPVLDSDGSFFLVSKLT |
| | | VDKSRWQQGNVFSCSVMHEALHNHYTQKSLSLS |
| | | PGK |
| SEQ ID NO: 458 | CD3 scFv | QVQLVESGGGVVQPGRSLRLSCAASGFAFRKYG |
| | heavy | MSWVRQAPGKGLEWVALIYYDSSKMNYADTVKG |
| | chain | RFTISRDNSKNTLYLQMNSLRAEDTAVYYCAALNS |
| | | EYDWGQGTMVTVSGGGGSGGGGSGGGGSGGG |
| | | GSDIQMTQSPSSLSASVGDRVTITCRGSQSIGNSL |
| | | NWYQQKPGKAPKRLIYSTSTLEYGVPSRFSGSGS |
| | | GTEYTLTISSLQPEDFATYYCLQYATYPYTFGQGT |
| | | KLEIKGSDKTHTCPPCPAPELLGGPSVFLFPPKPK |
| | | DTLMISRTPEVTCVVVDVSHEDPEVKFNWYVDGV |
| | | EVHNAKTKPREEQYASTYRVVSVLTVLHQDWLNG |
| | | KEYKCKVSNKALPAPIEKTISKAKGQPREPQVYTLP |
| | | PCREEMTKNQVSLWCLVKGFYPSDIAVEWESNGQ |
| | | PENNYKTTPPVLDSDGSFFLYSKLTVDKSRWQQG |
| | | NVFSCSVMHEALHNRYTQKSLSLSPGK |
| CD19-CD3 | | |
| bispecific 4 | | |
| (NOV221) | | |
| SEQ ID NO: 453 | CD19 light | EIVMTQSPATLSLSPGERATLSCRASQDISKYLNW |
| | chain | YQQKPGQAPRLLIYHTSRLHSGIPARFSGSGSGTD |
| | | YTLTISSLQPEDFAVYFCQQGNTLPYTFGQGTKLEI |
| | | KRTVAAPSVFIFPPSDEQLKSGTASVVCLLNNFYP |
| | | REAKVQWKVDNALQSGNSQESVTEQDSKDSTYSL |
| | | SSTLTLSKADYEKHKVYACEVTHQGLSSPVTKSFN |
| | | RGEC |
| SEQ ID NO: 454 | CD19 | QVQLQESGPGLVKPSETLSLTCTVSGVSLPDYGVS |
| | heavy | WIRQPPGKGLEWIGVIWGSETTYYQSSLKSRVTIS |
| | chain | KDNSKNQVSLKLSSVTAADTAVYYCAKHYYYGGS |
| | | YAMDYWGQGTLVTVSSASTKGPSVFPLAPSSKST |
| | | SGGTAALGCLVKDYFPEPVTVSWNSGALTSGVHT |
| | | FPAVLQSSGLYSLSSVVTVPSSSLGTQTYICNVNH |
| | | KPSNTKVDKRVEPKSCDKTHTCPPCPAPELLGGP |
| | | SVFLFPPKPKDTLMISRTPEVTCVVVDVSHEDPEV |
| | | KFNWYVDGVEVHNAKTKPREEQYASTYRVVSVLT |
| | | VLHQDWLNGKEYKCKVSNKALPAPIEKTISKAKGQ |
| | | PREPQVCTLPPSREEMTKNQVSLSCAVKGFYPSDI |
| | | AVEWESNGQPENNYKTTPPVLDSDGSFFLVSKLT |
| | | VDKSRWQQGNVFSCSVMHEALHNHYTQKSLSLS |
| | | PGK |
| SEQ ID NO: 454 | CD3 scFv | QVQLQESGPGLVKPSETLSLTCTVSGVSLPDYGVS |
| | heavy | WIRQPPGKGLEWIGVIWGSETTYYQSSLKSRVTIS |
| | chain | KDNSKNQVSLKLSSVTAADTAVYYCAKHYYYGGS |
| | | YAMDYWGQGTLVTVSSASTKGPSVFPLAPSSKST |
| | | SGGTAALGCLVKDYFPEPVTVSWNSGALTSGVHT |
| | | FPAVLQSSGLYSLSSVVTVPSSSLGTQTYICNVNH |
| | | KPSNTKVDKRVEPKSCDKTHTCPPCPAPELLGGP |
| | | SVFLFPPKPKDTLMISRTPEVTCVVVDVSHEDPEV |
| | | KFNWYVDGVEVHNAKTKPREEQYASTYRVVSVLT |
| | | VLHQDVVLNGKEYKCKVSNKALPAPIEKTISKAKGQ |
| | | PREPQVCTLPPSREEMTKNQVSLSCAVKGFYPSDI |
| | | AVEWESNGQPENNYKTTPPVLDSDGSFFLVSKLT |
| | | VDKSRWQQGNVFSCSVMHEALHNHYTQKSLSLS |
| | | PGK |
| CD19-CD3 | | |
| bispecific 5 | | |
| (NOV123) | | |
| SEQ ID NO: 453 | CD19 light | EIVMTQSPATLSLSPGERATLSCRASQDISKYLNW |
| | chain | YQQKPGQAPRLLIYHTSRLHSGIPARFSGSGSGTD |
| | | YTLTISSLQPEDFAVYFCQQGNTLPYTFGQGTKLEI |
| | | KRTVAAPSVFIFPPSDEQLKSGTASVVCLLNNFYP |
| | | REAKVQWKVDNALQSGNSQESVTEQDSKDSTYSL |
| | | SSTLTLSKADYEKHKVYACEVTHQGLSSPVTKSFN |
| | | RGEC |
| SEQ ID NO: 454 | CD19 | QVQLQESGPGLVKPSETLSLTCTVSGVSLPDYGVS |
| | heavy | WIRQPPGKGLEWIGVIWGSETTYYQSSLKSRVTIS |
| | chain | KDNSKNQVSLKLSSVTAADTAVYYCAKHYYYGGS |
| | | YAMDYWGQGTLVTVSSASTKGPSVFPLAPSSKST |
| | | SGGTAALGCLVKDYFPEPVTVSWNSGALTSGVHT |
| | | FPAVLQSSGLYSLSSVVTVPSSSLGTQTYICNVNH |
| | | KPSNTKVDKRVEPKSCDKTHTCPPCPAPELLGGP |
| | | SVFLFPPKPKDTLMISRTPEVTCVVVDVSHEDPEV |
| | | KFNWYVDGVEVHNAKTKPREEQYASTYRVVSVLT |
| | | VLHQDWLNGKEYKCKVSNKALPAPIEKTISKAKGQ |
| | | PREPQVCTLPPSREEMTKNQVSLSCAVKGFYPSDI |
| | | AVEWESNGQPENNYKTTPPVLDSDGSFFLVSKLT |
| | | VDKSRWQQGNVFSCSVMHEALHNHYTQKSLSLS |
| | | PGK |
| SEQ ID NO: 460 | CD3 scFv | QVQLVQSGAEVKKPGASVKVSCKASGYTFTSYYIY |
| | heavy | WVRQAPGQRLEVVMGYIYPGHDAIYYSENFKGRVT |
| | chain | ITADTSASTAYMELSSLRSEDTAVYYCVRPNTMMA |
| | | PLAYWGQGTLVTVSSGGGGSGGGGSGGGGSGG |
| | | GGSDVVMTQSPLSLPVTLGQPASISCRSSQSLIYSI |
| | | GNTYLHWYQQRPGQSPRLLIYRVSNRFSGVPDRF |
| | | SGSGSGTDFTLKISRVEAEDVGVYYCFQSTHLPYT |
| | | FGQGTKLEIKGSDKTHTCPPCPAPELLGGPSVFLF |
| | | PPKPKDTLMISRTPEVTCVVVDVSHEDPEVKFNWY |
| | | VDGVEVHNAKTKPREEQYASTYRVVSVLTVLHQD |
| | | VVLNGKEYKCKVSNKALPAPIEKTISKAKGQPREPQ |
| | | VYTLPPCREEMTKNQVSLWCLVKGFYPSDIAVEW |
| | | ESNGQPENNYKTTPPVLDSDGSFFLYSKLTVDKSR |
| | | WQQGNVFSCSVMHEALHNRYTQKSLSLSPGK |
| CD19-CD3 | | |
| bispecific 6 | | |
| (NOV453) | | |
| SEQ ID NO: 453 | CD19 light | EIVMTQSPATLSLSPGERATLSCRASQDISKYLNW |
| | chain | YQQKPGQAPRLLIYHTSRLHSGIPARFSGSGSGTD |
| | | YTLTISSLQPEDFAVYFCQQGNTLPYTFGQGTKLEI |
| | | KRTVAAPSVFIFPPSDEQLKSGTASVVCLLNNFYP |
| | | REAKVQWKVDNALQSGNSQESVTEQDSKDSTYSL |
| | | SSTLTLSKADYEKHKVYACEVTHQGLSSPVTKSFN |
| | | RGEC |
| SEQ ID NO: 454 | CD19 | QVQLQESGPGLVKPSETLSLTCTVSGVSLPDYGVS |
| | heavy | WIRQPPGKGLEWIGVIWGSETTYYQSSLKSRVTIS |
| | chain | KDNSKNQVSLKLSSVTAADTAVYYCAKHYYYGGS |
| | | YAMDYWGQGTLVTVSSASTKGPSVFPLAPSSKST |
| | | SGGTAALGCLVKDYFPEPVTVSWNSGALTSGVHT |
| | | FPAVLQSSGLYSLSSVVTVPSSSLGTQTYICNVNH |
| | | KPSNTKVDKRVEPKSCDKTHTCPPCPAPELLGGP |
| | | SVFLFPPKPKDTLMISRTPEVTCVVVDVSHEDPEV |
| | | KFNWYVDGVEVHNAKTKPREEQYASTYRVVSVLT |
| | | VLHQDWLNGKEYKCKVSNKALPAPIEKTISKAKGQ |
| | | PREPQVCTLPPSREEMTKNQVSLSCAVKGFYPSDI |
| | | AVEWESNGQPENNYKTTPPVLDSDGSFFLVSKLT |
| | | VDKSRWQQGNVFSCSVMHEALHNHYTQKSLSLS |
| | | PGK |
| SEQ ID NO: 461 CD3 scFv | | QVQLQESGPGLVKPSETLSLTCTVSGVSLPDYGVS |
| | heavy | WIRQPPGKGLEWIGVIWGSETTYYQSSLKSRVTIS |
| | chain | KDNSKNQVSLKLSSVTAADTAVYYCAKHYYYGGS |
| | | YAMDYWGQGTLVTVSSASTKGPSVFPLAPSSKST |
| | | SGGTAALGCLVKDYFPEPVTVSWNSGALTSGVHT |
| | | FPAVLQSSGLYSLSSVVTVPSSSLGTQTYICNVNH |
| | | KPSNTKVDKRVEPKSCDKTHTCPPCPAPELLGGP |
| | | SVFLFPPKPKDTLMISRTPEVTCVVVDVSHEDPEV |
| | | KFNWYVDGVEVHNAKTKPREEQYASTYRVVSVLT |
| | | VLHQDWLNGKEYKCKVSNKALPAPIEKTISKAKGQ |
| | | PREPQVCTLPPSREEMTKNQVSLSCAVKGFYPSDI |
| | | AVEWESNGQPENNYKTTPPVLDSDGSFFLVSKLT |
| | | VDKSRWQQGNVFSCSVMHEALHNHYTQKSLSLS |
| | | PGK |

### 8.5. Example 5: In Vitro Functional Activity of Anti-CD19-Anti-CD3 Bispecific Antibodies

[0789] In vitro functional activity was evaluated with a luciferase based cytotoxicity assay using the ALL cell line NALM-6 (DSMZ, Braunschwieg, Germany) which was transduced to stably express luciferase. Human T Cells isolated from cryopreserved PBMCs then expanded for 10 days with CD3/CD28 beads (ThermoFisher Scientific, Grand Island, N.Y., USA) were co-cultured at an effector:target ratio of 5:1 with the NALM-6 target cells. Bispecific antibodies were added at various concentrations and incubated for 20 hours after which ONE-Glo Luciferase Assay substrate (Promega, Madison, Wis., USA) was added. Luminescence was measured for treated and untreated (to provide maximal luminescence signal) wells and specific lysis (%) was determined as 100−(sample luminescence/average maximal luminescence)*100. The data is shown graphically in FIGS. 16-17. FIGS. 16-17 demonstrate that a bispecific CD19/CD3 antibody as disclosed herein is efficacious in a Redirected T-cell Cytotoxicity (RTCC) assay. As shown in FIG. 17, several anti-CD3 arms were of better or equal activity to the SP34 control. Bispecific 1 in FIG. 16 is a non-humanized, rat parental antibody.

### 8.6. Example 6: Anti-CD3-Anti-CD19 Bispecifc Antibodies: Rat Clones

[0790] Bispecific antibodies in the format of FIG. 1C having an anti-CD3 scFv and anti-CD19 Fab were constructed with VH and VL sequences of rat antibodies of Example 1 and expressed using the expression procedures described in Example 4. Constructs were characterized by measuring CD3+ T cell affinity by FACS and activity in a RTCC assay.

[0791] FACS was performed using human T cells isolated from cryopreserved PBMCs that were expanded for 10 days with CD3/CD28 beads (ThermoFisher Scientific, Grand Island, N.Y., USA). Cells were plated at 250,000 cells/well, 180 uL/well in cold FACS buffer (PBS/10% Fetal Bovine Serum). Constructs were prepared at an initial concentration of 1 μM and serially diluted 1:4. 20 μL of each construct was added to the respective well for a final volume of 200 μL and a final starting concentration 100 nM. Cells were incubated on ice for one hour. After washing and resuspension with cold FACS buffer, 1 μg of goat anti-human IgG Fc-specific antibody (Jackson Immunoresearch, 109-605-005) was added to each well. The secondary antibody was incubated for one hour on ice. Cells were then washed and ran on the cytometer (Beckman Coulter Cytoflex, B53011). Data was analyzed on GraphPad Prism using 5-parameter logistic fit.

[0792] RTCC was performed as described in Example 5.

[0793] RTCC assay results for constructs having VH and VL sequences of rat antibodies sp1c, sp10b (which is the parental antibody of NOV123), and sp11a (which is the parental antibody of NOV292) are shown in FIG. 18. Results of the CD3+ T cell affinity assay for those constructs are shown in FIG. 19.

### 8.7. Example 7: Anti-CD19-Anti-CD3 Bispecific Antibodies: Sp11a Variants

[0794] A series of bispecific antibodies having a CD3 binding arm based on sp11a (which is the parental antibody of NOV292) in scFv format and a CD19 binding arm in Fab format were produced in the format of FIG. 1C and expressed using the expression procedures described in Example 4, with the aim of producing bispecific antibodies with improved expression and/or altered function. Constructs having mutations that mitigate post translational modifications (referred to as “PTM” variants), constructs having backmutations (referred to as “bkm” variants), and constructs having modifications in the “WW” residues of CDR-H3 were produced.

[0795] Specifically, PTM variants were produced by modifying the “NG” site in CDR-H1 and the “DG” site in CDR-L1, as these are PTM sites. The “NG” site is a deamidation site and “DG” is a D isomerization site. Without being bound by theory, it is believed that modification at PTM sites can affect the activity of the molecule, especially when the modification site is in the CDRs, and it is believed that these modifications can also affect the folding of the scFv and, as a result, its quality and yield. Accordingly, these sites were modified.

[0796] For the bkm variants, backmutation of vernier residues was performed with the aim of creating constructs with a diversity of affinities.

[0797] In sp11a, HCDR3 has a highly hydrophobic patch provided by the sequence “FWW.” Hydrophylic residues threonine and serine were chosen to break the hydrophobic patch. Without being bound by theory, it is believed that by making the sequence more hydrophilic, the propensity for the molecule to aggregate is reduced. In addition, again without being bound by theory, it is believed that the folding of the protein to form a scFv is less disrupted without the hydrophobic patch. Tyrosine was also included in the series due to its aromatic nature that is akin to tryptophan.

[0798] Constructs were analyzed for expression and activity in a RTCC assay (as described in Example 5). Polypeptide sequences of the constructs are shown in Table 21.

TABLE 21

| Construct | | SEQ |
|---|---|---|
| (polypeptide | | ID |
| chain) | Amino Acid Sequence | NO: |
| All | QVQLQESGPGLVKPSETLSLTCTVSGVSLPDYGVSWIRQPPGKGLEWIGVI | 516 |
| Constructs of | WGSETTYYQSSLKSRVTISKDNSKNQVSLKLSSVTAADTAVYYCAKHYYYG | |
| Example | GSYAMDYWGQGTLVTVSSASTKGPSVFPLAPSSKSTSGGTAALGCLVKDY | |
| (CD19 heavy | FPEPVTVSWNSGALTSGVHTFPAVLQSSGLYSLSSVVTVPSSSLGTQTYICN | |
| chain) | VNHKPSNTKVDKRVEPKSCDKTHTCPPCPAPELLGGPSVFLFPPKPKDTLM | |
| | ISRTPEVTCVVVDVSHEDPEVKFNWYVDGVEVHNAKTKPREEQYASTYRVV | |
| | SVLTVLHQDWLNGKEYKCKVSNKALPAPIEKTISKAKGQPREPQVCTLPPSR | |
| | EEMTKNQVSLSCAVKGFYPSDIAVEVVESNGQPENNYKTTPPVLDSDGSFFL | |
| | VSKLTVDKSRWQQGNVFSCSVMHEALHNHYTQKSLSLSPGK | |
| All | EIVMTQSPATLSLSPGERATLSCRASQDISKYLNWYQQKPGQAPRLLIYHTS | 517 |
| Constructs of | RLHSGIPARFSGSGSGTDYTLTISSLQPEDFAVYFCQQGNTLPYTFGQGTKL | |
| Example | EIKRTVAAPSVFIFPPSDEQLKSGTASVVCLLNNFYPREAKVQVVKVDNALQS | |
| (CD19 light | GNSQESVTEQDSKDSTYSLSSTLTLSKADYEKHKVYACEVTHQGLSSPVTK | |
| chain) | SFNRGEC | |
| CD3_sp11a_ | QVQLVESGGGVVQPGRSLRLSCAASGFTFSKNGMHWVRQAPGKGLEVVVA | 515 |
| bkm1 | MIYYDSSKMYYADTVKGRFTISRDNSKNTLYLQMNSLRAEDTAVYYCASFW | |
| (CD3 scFv | WDLDFDHWGQGTMVTVSSGGGGSGGGGSGGGGSGGGGSDIVMTQTPL | |
| heavy chain) | SSPVTLGQPASISCRSSQSLVRSDGTTYFNWLQQRPGQPPRLLIYRVSNRF | |
| | SGVPDRFSGSGAGTDFTLKISRVEAEDVGVYYCLQSSHFPVVTFGGGTKVEI | |
| | KGSDKTHTCPPCPAPELLGGPSVFLFPPKPKDTLMISRTPEVTCVVVDVSHE | |
| | DPEVKFNWYVDGVEVHNAKTKPREEQYASTYRVVSVLTVLHQDVVLNGKEY | |
| | KCKVSNKALPAPIEKTISKAKGQPREPQVYTLPPCREEMTKNQVSLWCLVK | |
| | GFYPSDIAVEVVESNGQPENNYKTTPPVLDSDGSFFLYSKLTVDKSRWQQG | |
| | NVFSCSVMHEALHNRYTQKSLSLSPGK | |
| CD3_SP11a_ | QVQLVESGGGVVQPGRSLRLSCAASGFTFSKNGMHWVRQAPGKGLEWVA | 518 |
| bkm2 | MIYYDSSKMYYADTVKGRFTISRDNSKNTLYLQMNSLRAEDTAVYYCAKFW | |
| (CD3 scFv | WDLDFDHWGQGTMVTVSSGGGGSGGGGSGGGGSGGGGSDIVMTQTPL | |
| heavy chain) | SSPVTLGQPASISCRSSQSLVRSDGTTYFNWYQQRPGQPPRLLIYRVSNRF | |
| | SGVPDRFSGSGAGTDFTLKISRVEAEDVGVYYCLQSSHFPWTFGGGTKVEI | |
| | KGGGSDKTHTCPPCPAPELLGGPSVFLFPPKPKDTLMISRTPEVTCVVVDV | |
| | SHEDPEVKFNWYVDGVEVHNAKTKPREEQYASTYRVVSVLTVLHQDWLNG | |
| | KEYKCKVSNKALPAPIEKTISKAKGQPREPQVYTLPPCREEMTKNQVSLWC | |
| | LVKGFYPSDIAVEWESNGQPENNYKTTPPVLDSDGSFFLYSKLTVDKSRWQ | |
| | QGNVFSCSVMHEALHNRYTQKSLSLSPGK | |
| CD3_sp11a_ | QVQLVESGGGVVQPGRSLRLSCAASGFTFSKNGMHWVRQAPGKGLEWVA | 519 |
| hz0 | MIYYDSSKMYYADTVKGRFTISRDNSKNTLYLQMNSLRAEDTAVYYCAKFW | |
| (CD3 scFv | WDLDFDHWGQGTMVTVSSGGGGSGGGGSGGGGSGGGGSDIVMTQTPL | |
| heavy chain) | SSPVTLGQPASISCRSSQSLVRSDGTTYFNWLQQRPGQPPRLLIYRVSNRF | |
| | SGVPDRFSGSGAGTDFTLKISRVEAEDVGVYYCLQSSHFPWTFGGGTKVEI | |
| | KGSDKTHTCPPCPAPELLGGPSVFLFPPKPKDTLMISRTPEVTCVVVDVSHE | |
| | DPEVKFNWYVDGVEVHNAKTKPREEQYASTYRVVSVLTVLHQDVVLNGKEY | |
| | KCKVSNKALPAPIEKTISKAKGQPREPQVYTLPPCREEMTKNQVSLWCLVK | |
| | GFYPSDIAVEWESNGQPENNYKTTPPVLDSDGSFFLYSKLTVDKSRWQQG | |
| | NVFSCSVMHEALHNRYTQKSLSLSPGK | |
| CD3_SP11A_ | QVQLVESGGGVVQPGRSLRLSCAASGFTFSKNGMHWVRQAPGKGLEWVA | 520 |
| HZ1 | MIYYDSSKMYYADTVKGRFTISRDNSKNTLYLQMNSLRAEDTAVYYCASFW | |
| (CD3 scFv | WDLDFDHWGQGTMVTVSSGGGGSGGGGSGGGGSGGGGSDIVMTQTPL | |
| heavy chain) | SSPVTLGQPASISCRSSQSLVRSDGTTYFNWYQQRPGQPPRLLIYRVSNRF | |
| | SGVPDRFSGSGAGTDFTLKISRVEAEDVGVYYCLQSSHGSDKTHTCPPCPA | |
| | PELLGGPSVFLFPPKPKDTLMISRTPEVTCVVVDVSHEDPEVKFNWYVDGV | |
| | EVHNAKTKPREEQYASTYRVVSVLTVLHQDVVLNGKEYKCKVSNKALPAPIE | |
| | KTISKAKGQPREPQVYTLPPCREEMTKNQVSLWCLVKGFYPSDIAVEVVESN | |
| | GQPENNYKTTPPVLDSDGSFFLYSKLTVDKSRWQQGNVFSCSVMHEALHN | |
| | RYTQKSLSLSPGK | |
| CD3_sp11a_ | QVQLVESGGGVVQPGRSLRLSCAASGFTFSKQGMHWVRQAPGKGLEWV | 521 |
| sansPTM_hz | AMIYYDSSKMYYADTVKGRFTISRDNSKNTLYLQMNSLRAEDTAVYYCASF | |
| 1 | VWVDLDFDHWGQGTMVTVSSGGGGSGGGGSGGGGSGGGGSDIVMTQTP | |
| (CD3 scFv | LSSPVTLGQPASISCRSSQSLVRSEGTTYFNWYQQRPGQPPRLLIYRVSNR | |
| heavy chain) | FSGVPDRFSGSGAGTDFTLKISRVEAEDVGVYYCLQSSHFPWTFGGGTKV | |
| | EIKGSDKTHTCPPCPAPELLGGPSVFLFPPKPKDTLMISRTPEVTCVVVDVS | |
| | HEDPEVKFNWYVDGVEVHNAKTKPREEQYASTYRVVSVLTVLHQDVVLNGK | |
| | EYKCKVSNKALPAPIEKTISKAKGQPREPQVYTLPPCREEMTKNQVSLWCL | |
| | VKGFYPSDIAVEWESNGQPENNYKTTPPVLDSDGSFFLYSKLTVDKSRWQ | |
| | QGNVFSCSVMHEALHNRYTQKSLSLSPGK | |
| CD3_sp11a_ | EVKLVESGGDLVQPGDSLTLSCVASGFTFSKQGMHWIRQAPKKGLEWIAMI | 522 |
| sansPTM_rat | YYDSSKMYYADTVKGRFTISRDNSKNTLYLEMNSLRSEDTAMYYCASFVWV | |
| (CD3 scFv | DLDFDHWGQGVMVTVSSGGGGSGGGGSGGGGSGGGGSDILVTQTPVSL | |
| heavy chain) | PVSLGGHVSISCRSSQSLVRSEGTTYFNWYLQKPGQSPQLLIYRVSNRFSG | |
| | VPDRFSGSGSGTDFTLKISRVEPEDLGVYYCLQSSHFPWTFGGGTKLELKG | |
| | GGGSDKTHTCPPCPAPELLGGPSVFLFPPKPKDTLMISRTPEVTCVVVDVS | |
| | HEDPEVKFNWYVDGVEVHNAKTKPREEQYASTYRVVSVLTVLHQDWLNGK | |
| | EYKCKVSNKALPAPIEKTISKAKGQPREPQVYTLPPCREEMTKNQVSLWCL | |
| | VKGFYPSDIAVEWESNGQPENNYKTTPPVLDSDGSFFLYSKLTVDKSRWQ | |
| | QGNVFSCSVMHEALHNRYTQKSLSLSPGK | |
| CD3_sp11a_ | QVQLVESGGGVVQPGRSLRLSCAASGFTFSKNGMHVVVRQAPGKGLEWVA | 523 |
| VHVL_YY | MIYYDSSKMYYADTVKGRFTISRDNSKNTLYLQMNSLRAEDTAVYYCASFY | |
| (CD3 scFv | YDLDFDHWGQGTMVTVSSGGGGSGGGGSGGGGSGGGGSDIVMTQTPLS | |
| heavy chain) | SPVTLGQPASISCRSSQSLVRSDGTTYFNWYQQRPGQPPRLLIYRVSNRFS | |
| | GVPDRFSGSGAGTDFTLKISRVEAEDVGVYYCLQSSHFPWTFGGGTKVEIK | |
| | GGGSDKTHTCPPCPAPELLGGPSVFLFPPKPKDTLMISRTPEVTCVVVDVS | |
| | HEDPEVKFNWYVDGVEVHNAKTKPREEQYASTYRVVSVLTVLHQDWLNGK | |
| | EYKCKVSNKALPAPIEKTISKAKGQPREPQVYTLPPCREEMTKNQVSLWCL | |
| | VKGFYPSDIAVEWESNGQPENNYKTTPPVLDSDGSFFLYSKLTVDKSRWQ | |
| | QGNVFSCSVMHEALHNHYTQKSLSLSPGK | |
| CD3_SP11A_ | QVQLVESGGGVVQPGRSLRLSCAASGFTFSKNGMHWVRQAPGKGLEWVA | 524 |
| VHVL_SS | MIYYDSSKMYYADTVKGRFTISRDNSKNTLYLQMNSLRAEDTAVYYCASFS | |
| (CD3 scFv | SDLDFDHWGQGTMVTVSSGGGGSGGGGSGGGGSGGGGSDIVMTQTPLS | |
| heavy chain) | SPVTLGQPASISCRSSQSLVRSDGTTYFNWYQQRPGQPPRLLIYRVSNRFS | |
| | GVPDRFSGSGAGTDFTLKISRVEAEDVGVYYCLQSSHFPVVTFGGGTKVEIK | |
| | GGGSDKTHTCPPCPAPELLGGPSVFLFPPKPKDTLMISRTPEVTCVVVDVS | |
| | HEDPEVKFNWYVDGVEVHNAKTKPREEQYASTYRVVSVLTVLHQDWLNGK | |
| | EYKCKVSNKALPAPIEKTISKAKGQPREPQVYTLPPCREEMTKNQVSLWCL | |
| | VKGFYPSDIAVEWESNGQPENNYKTTPPVLDSDGSFFLYSKLTVDKSRWQ | |
| | QGNVFSCSVMHEALHNHYTQKSLSLSPGK | |
| CD3_SP11A_ | QVQLVESGGGVVQPGRSLRLSCAASGFTFSKNGMHVVVRQAPGKGLEWVA | 525 |
| VHVL_WS | MIYYDSSKMYYADTVKGRFTISRDNSKNTLYLQMNSLRAEDTAVYYCASFW | |
| (CD3 scFv | SDLDFDHWGQGTMVTVSSGGGGSGGGGSGGGGSGGGGSDIVMTQTPLS | |
| heavy chain) | SPVTLGQPASISCRSSQSLVRSDGTTYFNWYQQRPGQPPRLLIYRVSNRFS | |
| | GVPDRFSGSGAGTDFTLKISRVEAEDVGVYYCLQSSHFPWTFGGGTKVEIK | |
| | GGGSDKTHTCPPCPAPELLGGPSVFLFPPKPKDTLMISRTPEVTCVVVDVS | |
| | HEDPEVKFNWYVDGVEVHNAKTKPREEQYASTYRVVSVLTVLHQDVVLNGK | |
| | EYKCKVSNKALPAPIEKTISKAKGQPREPQVYTLPPCREEMTKNQVSLWCL | |
| | VKGFYPSDIAVEWESNGQPENNYKTTPPVLDSDGSFFLYSKLTVDKSRWQ | |
| | QGNVFSCSVMHEALHNHYTQKSLSLSPGK | |
| CD3_sp11a_ | QVQLVESGGGVVQPGRSLRLSCAASGFTFSKNGMHWVRQAPGKGLEWVA | 526 |
| VHVL_SW | MIYYDSSKMYYADTVKGRFTISRDNSKNTLYLQMNSLRAEDTAVYYCASFS | |
| (CD3 scFv | WDLDFDHWGQGTMVTVSSGGGGSGGGGSGGGGSGGGGSDIVMTQTPL | |
| heavy chain) | SSPVTLGQPASISCRSSQSLVRSDGTTYFNWYQQRPGQPPRLLIYRVSNRF | |
| | SGVPDRFSGSGAGTDFTLKISRVEAEDVGVYYCLQSSHFPVVTFGGGTKVEI | |
| | KGGGSDKTHTCPPCPAPELLGGPSVFLFPPKPKDTLMISRTPEVTCVVVDV | |
| | SHEDPEVKFNWYVDGVEVHNAKTKPREEQYASTYRVVSVLTVLHQDWLNG | |
| | KEYKCKVSNKALPAPIEKTISKAKGQPREPQVYTLPPCREEMTKNQVSLWC | |
| | LVKGFYPSDIAVEWESNGQPENNYKTTPPVLDSDGSFFLYSKLTVDKSRWQ | |
| | QGNVFSCSVMHEALHNHYTQKSLSLSPGK | |
| CD3_SP11A_ | QVQLVESGGGVVQPGRSLRLSCAASGFTFSKNGMHWVRQAPGKGLEWVA | 527 |
| VHVL_TT | MIYYDSSKMYYADTVKGRFTISRDNSKNTLYLQMNSLRAEDTAVYYCASFTT | |
| (CD3 scFv | DLDFDHWGQGTMVTVSSGGGGSGGGGSGGGGSGGGGSDIVMTQTPLSS | |
| heavy chain) | PVTLGQPASISCRSSQSLVRSDGTTYFNWYQQRPGQPPRLLIYRVSNRFSG | |
| | VPDRFSGSGAGTDFTLKISRVEAEDVGVYYCLQSSHFPWTFGGGTKVEIKG | |
| | GGSDKTHTCPPCPAPELLGGPSVFLFPPKPKDTLMISRTPEVTCVVVDVSH | |
| | EDPEVKFNWYVDGVEVHNAKTKPREEQYASTYRVVSVLTVLHQDWLNGKE | |
| | YKCKVSNKALPAPIEKTISKAKGQPREPQVYTLPPCREEMTKNQVSLWCLV | |
| | KGFYPSDIAVEWESNGQPENNYKTTPPVLDSDGSFFLYSKLTVDKSRWQQ | |
| | GNVFSCSVMHEALHNHYTQKSLSLSPGK | |
| CD3_SP11A_ | QVQLVESGGGVVQPGRSLRLSCAASGFTFSKNGMHWVRQAPGKGLEWVA | 528 |
| VHVL_TW | MIYYDSSKMYYADTVKGRFTISRDNSKNTLYLQMNSLRAEDTAVYYCASFT | |
| (CD3 scFv | WDLDFDHWGQGTMVTVSSGGGGSGGGGSGGGGSGGGGSDIVMTQTPL | |
| heavy chain) | SSPVTLGQPASISCRSSQSLVRSDGTTYFNWYQQRPGQPPRLLIYRVSNRF | |
| | SGVPDRFSGSGAGTDFTLKISRVEAEDVGVYYCLQSSHFPVVTFGGGTKVEI | |
| | KGGGSDKTHTCPPCPAPELLGGPSVFLFPPKPKDTLMISRTPEVTCVVVDV | |
| | SHEDPEVKFNVVYVDGVEVHNAKTKPREEQYASTYRVVSVLTVLHQDWLNG | |
| | KEYKCKVSNKALPAPIEKTISKAKGQPREPQVYTLPPCREEMTKNQVSLWC | |
| | LVKGFYPSDIAVEWESNGQPENNYKTTPPVLDSDGSFFLYSKLTVDKSRWQ | |
| | QGNVFSCSVMHEALHNHYTQKSLSLSPGK | |
| CD3_SP11A_ | QVQLVESGGGVVQPGRSLRLSCAASGFTFSKNGMHWVRQAPGKGLEWVA | 529 |
| VHVL_VVT | MIYYDSSKMYYADTVKGRFTISRDNSKNTLYLQMNSLRAEDTAVYYCASFW | |
| (CD3 scFv | TDLDFDHWGQGTMVTVSSGGGGSGGGGSGGGGSGGGGSDIVMTQTPLS | |
| heavy chain) | SPVTLGQPASISCRSSQSLVRSDGTTYFNWYQQRPGQPPRLLIYRVSNRFS | |
| | GVPDRFSGSGAGTDFTLKISRVEAEDVGVYYCLQSSHFPVVTFGGGTKVEIK | |
| | GGGSDKTHTCPPCPAPELLGGPSVFLFPPKPKDTLMISRTPEVTCVVVDVS | |
| | HEDPEVKFNWYVDGVEVHNAKTKPREEQYASTYRVVSVLTVLHQDVVLNGK | |
| | EYKCKVSNKALPAPIEKTISKAKGQPREPQVYTLPPCREEMTKNQVSLWCL | |
| | VKGFYPSDIAVEWESNGQPENNYKTTPPVLDSDGSFFLYSKLTVDKSRWQ | |
| | QGNVFSCSVMHEALHNHYTQKSLSLSPGK | |

[0799] Results of the RTCC assay are shown in FIG. 20 and FIG. 21.

[0800] PTM mitigation improved both protein production and potentcy in the RTCC assay (FIG. 19). Backmutations improved production, but caused a loss in function. Mutations of the “WW” residues of CDR-H3 revealed that the identity of the amino acids at the WW positions impacts both protein production and potency. Each W position yields its own level of influence, with the SW variant providing the greatest boost in function. A summary of the expression and function data for several constructs is shown in Table 22.

TABLE 22

| | | | Expression | | |
|---|---|---|---|---|---|
| Variant | VH | VL | level | | Function |
| CD3_sp11a_rat | Rat | Rat | 4 | mg/L | Compable |
| | | | | | to sp34 |
| CD3_sp11a_Hz0 | Hz0 | Hz0 | None | | N/A |
| CD3_sp11a_bkm1 | Hz1 | Hz0 | 23 | mg/L | Worse than |
| | | | | | sp34 |
| CD3_sp11a_bkm2 | Hz0 | Hz1 | 9 | mg/L | Worse than |
| | | | | | sp34 |
| CD3_sp11a_Hz1 | Hz1 | Hz1 | None | | N/A |
| CD3_sp11a_sansPTM | Hz1 - NG | Hz1 - DG | 4 | mg/L | Worse than |
| | (deamidation) | (D isomerization) | | | sp34 |
| CD3_sp11a_sansPTM_rat | Rat - NG | Rat-NG | 20 | mg/mL | Better than |
| | | | | | sp34 |
| CD3_sp11a_VHVL_SW | hz1 WS | hz1 | 20 | mg/mL | Better than |
| | | | | | sp34 |

### 8.8. Example 8: Anti-CD19-Anti-CD3 Bispecific Antibodies: Sp9a Variants

[0801] A series of anti-CD19-anti-CD3 bispecific antibodies having a CD3 binding arm based on sp9a (which is the parental antibody of NOV229) in different frameworks were produced in the format of FIG. 1E and expressed as in Example 4 to explore the effect of framework choice on a construct's activity and stability. The orientation of the scFv was also manipulated from VHVL to VLVH to assess its effect on the construct's potency. Without being bound by theory, it is believed that by changing the orientation, the CDRs are exposed to the environment in a different manner, which, again without being bound by theory, is believed to affect activity. Constructs were analyzed for expression, activity in a RTCC assay (as described in Example 5) and binding to CD3+ T cells (as described in Example 6). Polypeptide sequences of the constructs are shown in Table 23.

TABLE 23

| Construct | | SEQ |
|---|---|---|
| (polypeptide | | ID |
| chain) | Amino Acid Sequence | NO: |
| All | DKTHTCPPCPAPELLGGPSVFLFPPKPKDTLMISRTPEVTCVVVAVSHEDPE | 540 |
| Constructs of | VKFNWYVDGVEVHNAKTKPREEQYASTYRVVSVLTVLHQDWLNGKEYKCK | |
| Example | VSNKALAAPIEKTISKAKGQPREPQVYTLPPCREEMTKNQVSLWCLVKGFY | |
| (Fc chain) | PSDIAVEWESNGQPENNYKTTPPVLDSDGSFFLYSKLTVDKSRWQQGNVF | |
| | SCSVMHEALHNRYTQKSLSLSPGK | |
| All | EIVMTQSPATLSLSPGERATLSCRASQDISKYLNWYQQKPGQAPRLLIYHTS | 517 |
| Constructs of | RLHSGIPARFSGSGSGTDYTLTISSLQPEDFAVYFCQQGNTLPYTFGQGTKL | |
| Example | EIKRTVAAPSVFIFPPSDEQLKSGTASVVCLLNNFYPREAKVQWKVDNALQS | |
| (CD19 light | GNSQESVTEQDSKDSTYSLSSTLTLSKADYEKHKVYACEVTHQGLSSPVTK | |
| chain) | SFNRGEC | |
| CD3_sp9aF | EVQLVQSGAEVKKPGESLKISCKASGYSFTNYWMNWVRQMPGKGLEVVMG | 534 |
| W1_VL_VH_ | MIHPSDSEIRLNQKFQGQVTLSVDKSIGTAYMQWSSLKASDTAMYYCSRVVY | |
| S56G (CD19 | YLSSPMDYWGQGTTVTVSSASTKGPSVFPLAPSSKSTSGGTAALGCLVKD | |
| Heavy CD3 | YFPEPVTVSWNSGALTSGVHTFPAVLQSSGLYSLSSVVTVPSSSLGTQTYIC | |
| scFv chain) | NVNHKPSNTKVDKRVEPKSCGGGGSGGGGSEIVMTQSPSTLSASVGDRVII | |
| | TCKASQNINNYLNWYQQKPGKAPKLLIYNTDHLQAGVPSRFSGSGSGAEFT | |
| | LTISSLQPDDFATYYCLQHRSRYTFGQGTKLTVLGGGGGSGGGGSGGGGS | |
| | GGGGSEVQLVESGGGLVQPGGSLRLSCAASGFSLTTYNVHWVRQAPGKG | |
| | LEWVGRMRYSGDTSFNAALTSRFTISRDNSKNTLYLQMNSLRAEDTAVYYC | |
| | ASDPMYIPNYAYGVMNAWGQGTLVTVSSGGGSDKTHTCPPCPAPELLGGP | |
| | SVFLFPPKPKDTLMISRTPEVTCVVVAVSHEDPEVKFNWYVDGVEVHNAKT | |
| | KPREEQYASTYRVVSVLTVLHQDWLNGKEYKCKVSNKALAAPIEKTISKAKG | |
| | QPREPQVCTLPPSREEMTKNQVSLSCAVKGFYPSDIAVEWESNGQPENNY | |
| | KTTPPVLDSDGSFFLVSKLTVDKSRWQQGNVFSCSVMHEALHNHYTQKSL | |
| | SLSPGK | |
| CD3_SP9AF | EVQLVQSGAEVKKPGESLKISCKASGYSFTNYWMNWVRQMPGKGLEWMG | 535 |
| W4_VL_VH_ | MIHPSDSEIRLNQKFQGQVTLSVDKSIGTAYMQWSSLKASDTAMYYCSRWY | |
| S56G (CD19 | YLSSPMDYWGQGTTVTVSSASTKGPSVFPLAPSSKSTSGGTAALGCLVKD | |
| Heavy CD3 | YFPEPVTVSWNSGALTSGVHTFPAVLQSSGLYSLSSVVTVPSSSLGTQTYIC | |
| scFv chain) | NVNHKPSNTKVDKRVEPKSCGGGGSGGGGSEIVMTQSPSTLSASVGDRVII | |
| | TCKASQNINNYLNWYQQKPGKAPKWYNTDHLQAGVPSRFSGSGSGAEFT | |
| | LTISSLQPDDFATYYCLQHRSRYTFGQGTKLTVLGGGGGSGGGGSGGGGS | |
| | GGGGSEVQLVETGGGLVQPGGSRRLSCAASGFSLTTYNVHWVRQAPGKG | |
| | LEWVGRMRYSGDTSFNAALTSRFTISRDTSKNTVYLQMNSLRAEDTGVYYC | |
| | ASDPMYIPNYAYGVMNAWGQGTLVTVSSGGGSDKTHTCPPCPAPELLGGP | |
| | SVFLFPPKPKDTLMISRTPEVTCVVVAVSHEDPEVKFNWYVDGVEVHNAKT | |
| | KPREEQYASTYRVVSVLTVLHQDWLNGKEYKCKVSNKALAAPIEKTISKAKG | |
| | QPREPQVCTLPPSREEMTKNQVSLSCAVKGFYPSDIAVEWESNGQPENNY | |
| | KTTPPVLDSDGSFFLVSKLTVDKSRWQQGNVFSCSVMHEALHNHYTQKSL | |
| | SLSPGK | |
| CD3_sp9aF | EVQLVQSGAEVKKPGESLKISCKASGYSFTNYWMNWVRQMPGKGLEWMG | 536 |
| W1_VL_VH | MIHPSDSEIRLNQKFQGQVTLSVDKSIGTAYMQWSSLKASDTAMYYCSRVVY | |
| (CD19 Heavy | YLSSPMDYWGQGTTVTVSSASTKGPSVFPLAPSSKSTSGGTAALGCLVKD | |
| CD3 scFv | YFPEPVTVSWNSGALTSGVHTFPAVLQSSGLYSLSSVVTVPSSSLGTQTYIC | |
| chain) | NVNHKPSNTKVDKRVEPKSCGGGGSGGGGSEIVMTQSPSTLSASVGDRVII | |
| | TCKASQNINNYLNWYQQKPGKAPKWYNTDHLQAGVPSRFSGSGSGAEFT | |
| | LTISSLQPDDFATYYCLQHRSRYTFGQGTKLTVLGGGGGSGGGGSGGGGS | |
| | GGGGSEVQLVETGGGLVQPGGSRRLSCAASGFSLTTYNVHWVRQAPGKG | |
| | LEWVSRMRYSGDTSFNAALTSRFTISRDTSKNTVYLQMNSLRAEDTGVYYC | |
| | ASDPMYIPNYAYGVMNAWGQGTLVTVSSGGGSDKTHTCPPCPAPELLGGP | |
| | SVFLFPPKPKDTLMISRTPEVTCVVVAVSHEDPEVKFNWYVDGVEVHNAKT | |
| | KPREEQYASTYRVVSVLTVLHQDWLNGKEYKCKVSNKALAAPIEKTISKAKG | |
| | QPREPQVCTLPPSREEMTKNQVSLSCAVKGFYPSDIAVEWESNGQPENNY | |
| | KTTPPVLDSDGSFFLVSKLTVDKSRWQQGNVFSCSVMHEALHNHYTQKSL | |
| | SLSPGK | |
| CD3_sp9aF | EVQLVQSGAEVKKPGESLKISCKASGYSFTNYWMNWVRQMPGKGLEWMG | 537 |
| W4_VLVH | MIHPSDSEIRLNQKFQGQVTLSVDKSIGTAYMQWSSLKASDTAMYYCSRWY | |
| (CD19 Heavy | YLSSPMDYWGQGTTVTVSSASTKGPSVFPLAPSSKSTSGGTAALGCLVKD | |
| CD3 scFv | YFPEPVTVSWNSGALTSGVHTFPAVLQSSGLYSLSSVVTVPSSSLGTQTYIC | |
| chain) | NVNHKPSNTKVDKRVEPKSCGGGGSGGGGSEIVMTQSPSTLSASVGDRVII | |
| | TCKASQNINNYLNWYQQKPGKAPKWYNTDHLQAGVPSRFSGSGSGAEFT | |
| | LTISSLQPDDFATYYCLQHRSRYTFGQGTKLTVLGGGGGSGGGGSGGGGS | |
| | GGGGSEVQLVESGGGLVQPGGSLRLSCAASGFSLTTYNVHWVRQAPGKG | |
| | LEWVSRMRYSGDTSFNAALTSRFTISRDNSKNTLYLQMNSLRAEDTAVYYC | |
| | ASDPMYIPNYAYGVMNAWGQGTLVTVSSGGGSDKTHTCPPCPAPELLGGP | |
| | SVFLFPPKPKDTLMISRTPEVTCVVVAVSHEDPEVKFNWYVDGVEVHNAKT | |
| | KPREEQYASTYRVVSVLTVLHQDWLNGKEYKCKVSNKALAAPIEKTISKAKG | |
| | QPREPQVCTLPPSREEMTKNQVSLSCAVKGFYPSDIAVEWESNGQPENNY | |
| | KTTPPVLDSDGSFFLVSKLTVDKSRWQQGNVFSCSVMHEALHNHYTQKSL | |
| | SLSPGK | |
| CD3_sp9ara | EVQLVQSGAEVKKPGESLKISCKASGYSFTNYWMNWVRQMPGKGLEWMG | 538 |
| btor_VHVL | MIHPSDSEIRLNQKFQGQVTLSVDKSIGTAYMQWSSLKASDTAMYYCSRWY | |
| (CD19 Heavy | YLSSPMDYWGQGTTVTVSSASTKGPSVFPLAPSSKSTSGGTAALGCLVKD | |
| CD3 scFv | YFPEPVTVSWNSGALTSGVHTFPAVLQSSGLYSLSSVVTVPSSSLGTQTYIC | |
| chain) | NVNHKPSNTKVDKRVEPKSCGGGGSGGGGSEVQLVESGGGSVQPGGSL | |
| | RLSCTASGFSLTTYNVHWVRQAPGKGLEVVVGRMRYSGDTSFNAALTSRFT | |
| | ISRDTSKNTVYLQMNSLRAEDTATYYCASDPMYIPNYAYGVMNAWGQGTT | |
| | VTVSSGGGGGSGGGGSGGGGSGGGGSEIVMTQSPSTLSASVGDRVIITCK | |
| | ASQNINNYLNWYQQKPGKAPKWYNTDHLQAGVPSRFSGSGSGAEFTLTIS | |
| | SLQPDDFATYYCLQHRSRYTFGQGTKLTVLGGGSDKTHTCPPCPAPELLG | |
| | GPSVFLFPPKPKDTLMISRTPEVTCVVVAVSHEDPEVKFNWYVDGVEVHNA | |
| | KTKPREEQYASTYRVVSVLTVLHQDVVLNGKEYKCKVSNKALAAPIEKTISKA | |
| | KGQPREPQVCTLPPSREEMTKNQVSLSCAVKGFYPSDIAVEVVESNGQPEN | |
| | NYKTTPPVLDSDGSFFLVSKLTVDKSRWQQGNVFSCSVMHEALHNHYTQK | |
| | SLSLSPGK | |
| CD3_sp9ara | EVQLVQSGAEVKKPGESLKISCKASGYSFTNYWMNWVRQMPGKGLEVVMG | 539 |
| btor_VLVH | MIHPSDSEIRLNQKFQGQVTLSVDKSIGTAYMQWSSLKASDTAMYYCSRWY | |
| (CD19 Heavy | YLSSPMDYWGQGTTVTVSSASTKGPSVFPLAPSSKSTSGGTAALGCLVKD | |
| CD3 scFv | YFPEPVTVSWNSGALTSGVHTFPAVLQSSGLYSLSSVVTVPSSSLGTQTYIC | |
| chain) | NVNHKPSNTKVDKRVEPKSCGGGGSGGGGSEIVMTQSPSTLSASVGDRVII | |
| | TCKASQNINNYLNWYQQKPGKAPKWYNTDHLQAGVPSRFSGSGSGAEFT | |
| | LTISSLQPDDFATYYCLQHRSRYTFGQGTKLTVLGGGGGSGGGGSGGGGS | |
| | GGGGSEVQLVESGGGSVQPGGSLRLSCTASGFSLTTYNVHWVRQAPGKG | |
| | LEWVGRMRYSGDTSFNAALTSRFTISRDTSKNTVYLQMNSLRAEDTATYYC | |
| | ASDPMYIPNYAYGVMNAWGQGTTVTVSSGGGSDKTHTCPPCPAPELLGGP | |
| | SVFLFPPKPKDTLMISRTPEVTCVVVAVSHEDPEVKFNWYVDGVEVHNAKT | |
| | KPREEQYASTYRVVSVLTVLHQDWLNGKEYKCKVSNKALAAPIEKTISKAKG | |
| | QPREPQVCTLPPSREEMTKNQVSLSCAVKGFYPSDIAVEWESNGQPENNY | |
| | KTTPPVLDSDGSFFLVSKLTVDKSRWQQGNVFSCSVMHEALHNHYTQKSL | |
| | SLSPGK | |

[0802] Results of the RTCC assay are shown in FIG. 22. Results of the CD3+ T cell affinity assay are shown in FIG. 23. A summary of the expression and RTCC data for some of the constructs is shown in Table 24.

TABLE 24

| Construct | Expression (mg/L) | RTCC (EC50 in pM) |
|---|---|---|
| CD3_sp9arabtor_VL_VH | 46 | 0.8 |
| CD3_sp9arabtor_VH_VL | 48 | 0.25 |
| CD3_sp9aFW1_VL_VH | 40 | 1.01 |
| sp34 | 21 | 0.39 |

[0803] The constructs in the various frameworks were found to have relatively high expression when compared to sp34. CD3_sp9arabtor_VL_VH and CD3_sp9arabtor_VH_VL showed differences in T cell affinity.

### 8.9. Example 9: Anti-CD19-Anti-CD3 Bispecific Antibodies: Sp11a Variants

[0804] Bispecific antibodies having a CD3 binding arm based on sp11a (which is the parental antibody of NOV292) in scFv format and a CD19 binding arm in Fab format are produced in the format of FIG. 10, as in Example 7. CDR, VH, and VL sequences for the following constructs of this Example are shown in Table 1:

CD3_sp11a_VHVL_YY_SANSPTM; CD3_sp11a_VHVL_YY_SANSPTM_Y; CD3_sp11a_VHVL_YY_SANSPTM_S; CD3_sp11a_VHVL_YY_Y; CD3_sp11a_VHVL_YY_s; CD3_sp11a_VHVL_SS_SANSPTM; CD3_sp11a_VHVL_SS_SANSPTM_Y; CD3_sp11a_VHVL_SS_SANSPTM_S; CD3_sp11a_VHVL_SS_Y; CD3_sp11a_VHVL_SS_S; CD3_sp11a_VHVL_SS_SANSPTM; CD3_sp11a_VHVL_WS_SANSPTM_Y; CD3_sp11a_VHVL_WS_SANSPTM_S; CD3_sp11a_VHVL_WS_Y; CD3_sp11a_VHVL_WS_S; CD3_sp11a_VHVL_WS_SANSPTM; CD3_sp11a_VHVL_SW_SANSPTM_Y; CD3_sp11a_VHVL_SW_SANSPTM_S; CD3_sp11a_VHVL_SW_Y; CD3_sp11a_VHVL_SW_S; CD3_sp11a_VHVL_SW_SANSPTM; CD3_sp11a_VHVL_TW_SANSPTM_Y; CD3_sp11a_VHVL_TW_SANSPTM_S; CD3_sp11a_VHVL_TW_Y; CD3_sp11a_VHVL_TW_S; CD3_sp11a_VHVL_TW_SANSPTM; CD3_sp11a_VHVL_TT_SANSPTM_Y; CD3_sp11a_VHVL_TT_SANSPTM_S; CD3_sp11a_VHVL_TT_Y; CD3_sp11a_VHVL_TT_S; CD3_sp11a_VHVL_TT_SANSPTM; CD3_SP11AVH3_VLK_3_Y; CD3_SP11AVH3_VLK_3_S; CD3_SP11AVH3_VLK3_Y_PTM; CD3_SP11AVH3_VLK3_S_PTM; CD3_SP11AVH3_VLK_3_Y_SW; CD3_SP11AVH3_VLK_3S_SW; CD3_SP11AVH3_VLK3_Y_PTM_SW; CD3_SP11AVH3_VLK3_S_SWPTM; CD3_SP11AVH3_VLK_SWPTM; CD3_SP11AVH3_VLK_3_SW; CD3_sp11a_VH1_VK2_Y; CD3_sp11a_VH1_VK2_S; CD3_sp11a_VH1_VK2_Y_PTM; CD3_sp11a_VH1_VK2_S_PTM; CD3_sp11a_VH1_VK2_Y_SW; CD3_sp11a_VH1_VK2_S_SW; CD3_sp11a_VH1_VK2_Y_PTM; CD3_sp11a_VH1_VK2_S_PTM_SW; CD3_sp11a_VH1_VK2_SW; CD3_sp11a_VH1_VK2_SW PTM; CD3_SP11A_VH3_VLK1_Y; CD3_SP11A_VH3_VLK1_5; CD3_SP11A_VH3_VLK1_Y_PTM; CD3_SP11A_VH3_VLK1_S_PTM; CD3_SP11A_VH3_VLK1_Y_SW; CD3_SP11A_VH3_VLK1_S_SW; CD3_SP11A_VH3_VLK1_Y_PTM; CD3_SP11A_VH3_VLK1_S_PTM_SW; CD3_SP11A_VH3_VLK1PTM_SW; CD3_SP11A_VH3_VLK1_SW; CD3_SP11A_VH5_VK2_Y; CD3_SP11A_VH5_VK2_5; CD3_SP11A_VH5_VK2_Y_PTM; CD3_SP11A_VH5_VK2_S_PTM; CD3_SP11A_VH5_VK2_Y_SW; CD3_SP11A_VH5_VK2_S_SW; CD3_SP11A_VH5_VK2_Y_PTM_SW; CD3_SP11A_VH5_VK2_S_PTM_SW; CD3_SP11A_VH5_VK2_PTM_SW; CD3_SP11A_VH5_VK2SW.

[0805] Full bispecific antibody sequences for several of the constructs are shown in Table 25. CD3 scFv heavy chain polypeptides for the other constructs of this Example are made by replacing the VH and VL sequences in the CD3 scFv heavy chain sequences shown in Table 25 with the respective VH and VL sequences of the other constructs.

TABLE 25

| Construct | | SEQ |
|---|---|---|
| (polypeptide | | ID |
| chain) | Amino Acid Sequence | NO: |
| All | QVQLQESGPGLVKPSETLSLTCTVSGVSLPDYGVSWIRQPPGKGLEWIGVI | 516 |
| Constructs of | WGSETTYYQSSLKSRVTISKDNSKNQVSLKLSSVTAADTAVYYCAKHYYYG | |
| Example | GSYAMDYWGQGTLVTVSSASTKGPSVFPLAPSSKSTSGGTAALGCLVKDY | |
| (CD19 heavy | FPEPVTVSWNSGALTSGVHTFPAVLQSSGLYSLSSVVTVPSSSLGTQTYICN | |
| chain) | VNHKPSNTKVDKRVEPKSCDKTHTCPPCPAPELLGGPSVFLFPPKPKDTLM | |
| | ISRTPEVTCVVVDVSHEDPEVKFNWYVDGVEVHNAKTKPREEQYASTYRVV | |
| | SVLTVLHQDWLNGKEYKCKVSNKALPAPIEKTISKAKGQPREPQVCTLPPSR | |
| | EEMTKNQVSLSCAVKGFYPSDIAVEVVESNGQPENNYKTTPPVLDSDGSFFL | |
| | VSKLTVDKSRWQQGNVFSCSVMHEALHNHYTQKSLSLSPGK | |
| All | EIVMTQSPATLSLSPGERATLSCRASQDISKYLNWYQQKPGQAPRLLIYHTS | 517 |
| Constructs of | RLHSGIPARFSGSGSGTDYTLTISSLQPEDFAVYFCQQGNTLPYTFGQGTKL | |
| Example | EIKRTVAAPSVFIFPPSDEQLKSGTASVVCLLNNFYPREAKVQWKVDNALQS | |
| (CD19 light | GNSQESVTEQDSKDSTYSLSSTLTLSKADYEKHKVYACEVTHQGLSSPVTK | |
| chain) | SFNRGEC | |
| CD3_SP11A | QVQLVESGGGVVQPGRSLRLSCAASGFTFSKNGMHWVRQAPGKGLEWVA | 530 |
| VH3_VLK_3 | MIYYDSSKMYYADTVKGRFTISRDNSKNTLYLQMNSLRAEDTAVYYCASFW | |
| (CD3 scFv | VVDLDFDHWGQGTMVTVSSGGGGSGGGGSGGGGSGGGGSEIVLTQSPGT | |
| heavy chain) | LSLSPGERATLSCRSSQSLVRSEGTTYFNWYQQKPGQAPRLLIYRVSNRFS | |
| | GIPDRFSGSGSGTDFTLTISRLEPEDLAVYYCLQSSHFPWTFGGGTKVEIKG | |
| | GGSDKTHTCPPCPAPELLGGPSVFLFPPKPKDTLMISRTPEVTCVVVDVSH | |
| | EDPEVKFNWYVDGVEVHNAKTKPREEQYASTYRVVSVLTVLHQDWLNGKE | |
| | YKCKVSNKALPAPIEKTISKAKGQPREPQVYTLPPCREEMTKNQVSLW | |
| | CLVKGFYPSDIAVEWESNGQPENNYKTTPPVLDSDGSFFLYSKLTVDKSRW | |
| | QQGNVFSCSVMHEALHNHYTQKSLSLSPGK | |
| CD3_sp11a_ | QVQLVQSGAEVKKPGASVKVSCKASGFTFSKQGMHWVRQAPGQGLEWM | 531 |
| VH1_VK2 | GMIYYDSSKMYYADTVKGRVTMTRDTSTNTLYMELSSLRSEDTAVYYCASF | |
| (CDscFv | VWVDLDFDHWGQGTMVTVSSGGGGSGGGGSGGGGSGGGGSDIVMTQTP | |
| heavy chain) | LSSPVTLGQPASISCRSSQSLVRSDGTTYFNWYQQRPGQPPRLLIYRVSNR | |
| | FSGVPDRFSGSGAGTDFTLKISRVEAEDVGVYYCLQSSHFPVVTFGGGTKV | |
| | EIKGGGSDKTHTCPPCPAPELLGGPSVFLFPPKPKDTLMISRTPEVTCVVVD | |
| | VSHEDPEVKFNWYVDGVEVHNAKTKPREEQYASTYRVVSVLTVLHQDWLN | |
| | GKEYKCKVSNKALPAPIEKTISKAKGQPREPQVYTLPPCREEMTKNQVSLW | |
| | CLVKGFYPSDIAVEWESNGQPENNYKTTPPVLDSDGSFFLYSKLTVDKSRW | |
| | QQGNVFSCSVMHEALHNHYTQKSLSLSPGK | |
| CD3_SP11A | QVQLVESGGGVVQPGRSLRLSCAASGFTFSKNGMHWVRQAPGKGLEWVA | 532 |
| _VH3_VLK1 | MIYYDSSKMYYADTVKGRFTISRDNSKNTLYLQMNSLRAEDTAVYYCASFW | |
| (CD3 scFv | WDLDFDHWGQGTMVTVSSGGGGSGGGGSGGGGSGGGGSDIQMTQSPS | |
| heavy chain) | SLSASVGDRVTITCRSSQSLVRSEGTTYFNWYQQKPGKAPKWYRVSNRF | |
| | SGVPSRFSGSGSGTDFTLTISSLQPEDFATYYCLQSSHFPVVTFGGGTKVEI | |
| | KGGGSDKTHTCPPCPAPELLGGPSVFLFPPKPKDTLMISRTPEVTCVVVDV | |
| | SHEDPEVKFNWYVDGVEVHNAKTKPREEQYASTYRVVSVLTVLHQDWLNG | |
| | KEYKCKVSNKALPAPIEKTISKAKGQPREPQVYTLPPCREEMTKNQVSLWC | |
| | LVKGFYPSDIAVEWESNGQPENNYKTTPPVLDSDGSFFLYSKLTVDKSRWQ | |
| | QGNVFSCSVMHEALHNHYTQKSLSLSPGK | |
| CD3_SP11A | EVQLVQSGAEVKKPGESLKISCKGSGFTFSKQGMHWVRQMPGKGLEWMG | 533 |
| _VH5_VK2 | MIYYDSSKMYYADTVKGQVTISRDNSINTLYLQWSSLKASDTAMYYCASFW | |
| (CD3 scFv | WDLDFDHWGQGTMVTVSSGGGGSGGGGSGGGGSGGGGSDIVMTQTPL | |
| heavy chain) | SSPVTLGQPASISCRSSQSLVRSDGTTYFNWYQQRPGQPPRLLIYRVSNRF | |
| | SGVPDRFSGSGAGTDFTLKISRVEAEDVGVYYCLQSSHFPWTFGGGTKVEI | |
| | KGGGSDKTHTCPPCPAPELLGGPSVFLFPPKPKDTLMISRTPEVTCVVVDV | |
| | SHEDPEVKFNWYVDGVEVHNAKTKPREEQYASTYRVVSVLTVLHQDWLNG | |
| | KEYKCKVSNKALPAPIEKTISKAKGQPREPQVYTLPPCREEMTKNQVSLWC | |
| | LVKGFYPSDIAVEWESNGQPENNYKTTPPVLDSDGSFFLYSKLTVDKSRWQ | |
| | QGNVFSCSVMHEALHNHYTQKSLSLSPGK | |

### 9. SPECIFIC EMBODIMENTS

[0806] While various specific embodiments have been illustrated and described, it will be appreciated that various changes can be made without departing from the spirit and scope of the disclosure(s). The present disclosure is exemplified by the numbered embodiments set forth below.

### 9.1. Numbered Embodiments 1 to 1442

[0807] 1. A CD3 binding molecule that specifically binds to human CD3 and comprises a CDR-H1 sequence, a CDR-H2 sequence a CDR-H3 sequence, a CDR-L1 sequence, a CDR-L2 sequence, and a CDR-L3 sequence set forth in Table 1A, Table 1B, or Table 10.
2. The CD3 binding molecule of embodiment 1, which comprises a CDR-H1 sequence, a CDR-H2 sequence, a CDR-H3 sequence, a CDR-L1 sequence, a CDR-L2 sequence, and a CDR-L3 sequence set forth in Table 1A.
3. The CD3 binding molecule of embodiment 2, wherein the amino acid designated X₁ in Table 1A is T.
4. The CD3 binding molecule of embodiment 2, wherein the amino acid designated X₁ in Table 1A is A.
5. The CD3 binding molecule of any one of embodiments 2 to 4, wherein the amino acid designated X₂ in Table 1A is S.
6. The CD3 binding molecule of any one of embodiments 2 to 4, wherein the amino acid designated X₂ in Table 1A is R.
7. The CD3 binding molecule of any one of embodiments 2 to 6, wherein the amino acid designated X₃ in Table 1A is N.
8. The CD3 binding molecule of any one of embodiments 2 to 6, wherein the amino acid designated X₃ in Table 1A is Y.
9. The CD3 binding molecule of any one of embodiments 2 to 6, wherein the amino acid designated X₃ in Table 1A is Q.
10. The CD3 binding molecule of any one of embodiments 2 to 9, wherein the amino acid designated X₄ in Table 1A is H.
11. The CD3 binding molecule of any one of embodiments 2 to 9, wherein the amino acid designated X₄ in Table 1A is S.
12. The CD3 binding molecule of any one of embodiments 2 to 11, wherein the amino acid designated X₅ in Table 1A is M.
13. The CD3 binding molecule of any one of embodiments 2 to 11, wherein the amino acid designated X₅ in Table 1A is L.
14. The CD3 binding molecule of any one of embodiments 2 to 13, wherein the amino acid designated X₆ in Table 1A is K.
15. The CD3 binding molecule of any one of embodiments 2 to 13, wherein the amino acid designated X₆ in Table 1A is R.
16. The CD3 binding molecule of any one of embodiments 2 to 15, wherein the amino acid designated X₇ in Table 1A is S.
17. The CD3 binding molecule of any one of embodiments 2 to 15, wherein the amino acid designated X₇ in Table 1A is K.
18. The CD3 binding molecule of any one of embodiments 2 to 17, wherein the amino acid designated X₅₅ in Table 1A is F.
19. The CD3 binding molecule of any one of embodiments 2 to 17, wherein the amino acid designated X₅₅ in Table 1A is Y.
20. The CD3 binding molecule of any one of embodiments 2 to 17, wherein the amino acid designated X₅₅ in Table 1A is S.
21. The CD3 binding molecule of any one of embodiments 2 to 20, wherein the amino acid designated X₈ in Table 1A is W.
22. The CD3 binding molecule of any one of embodiments 2 to 20, wherein the amino acid designated X₈ in Table 1A is Y.
23. The CD3 binding molecule of any one of embodiments 2 to 20, wherein the amino acid designated X₈ in Table 1A is S.
24. The CD3 binding molecule of any one of embodiments 2 to 20, wherein the amino acid designated X₈ in Table 1A is T.
25. The CD3 binding molecule of any one of embodiments 2 to 24, wherein the amino acid designated X₉ in Table 1A is W.
26. The CD3 binding molecule of any one of embodiments 2 to 24, wherein the amino acid designated X₉ in Table 1A is Y.
27. The CD3 binding molecule of any one of embodiments 2 to 24, wherein the amino acid designated X₉ in Table 1A is S.
28. The CD3 binding molecule of any one of embodiments 2 to 24, wherein the amino acid designated X₉ in Table 1A is T.
29. The CD3 binding molecule of any one of embodiments 2 to 28, wherein the amino acid designated X₁₀ in Table 1A is H.
30. The CD3 binding molecule of any one of embodiments 2 to 28, wherein the amino acid designated X₁₀ in Table 1A is Y.
31. The CD3 binding molecule of any one of embodiments 2 to 30, wherein the amino acid designated X₁₁ in Table 1A is S.
32. The CD3 binding molecule of any one of embodiments 2 to 30, wherein the amino acid designated X₁₁ in Table 1A is G.
33. The CD3 binding molecule of any one of embodiments 2 to 32, wherein the amino acid designated X₁₂ in Table 1A is I.
34. The CD3 binding molecule of any one of embodiments 2 to 32, wherein the amino acid designated X₁₂ in Table 1A is L.
35. The CD3 binding molecule of any one of embodiments 2 to 34, wherein the amino acid designated X₁₃ in Table 1A is V.
36. The CD3 binding molecule of any one of embodiments 2 to 34, wherein the amino acid designated X₁₃ in Table 1A is G.
37. The CD3 binding molecule of any one of embodiments 2 to 36, wherein the amino acid designated X₁₄ in Table 1A is R.
38. The CD3 binding molecule of any one of embodiments 2 to 36, wherein the amino acid designated X₁₄ in Table 1A is N.
39. The CD3 binding molecule of any one of embodiments 2 to 38, wherein the amino acid designated X₁₅ in Table 1A is D.
40. The CD3 binding molecule of any one of embodiments 2 to 38, wherein the amino acid designated X₁₅ in Table 1A is E.
41. The CD3 binding molecule of any one of embodiments 2 to 38, wherein the amino acid designated X₁₅ in Table 1A is L.
42. The CD3 binding molecule of any one of embodiments 2 to 41, wherein the amino acid designated X₁₆ in Table 1A is G.
43. The CD3 binding molecule of any one of embodiments 2 to 41, wherein the amino acid designated X₁₆ in Table 1A is N.
44. The CD3 binding molecule of any one of embodiments 2 to 41, wherein the amino acid designated X₁₆ in Table 1A is E.
45. The CD3 binding molecule of any one of embodiments 2 to 44, wherein the amino acid designated X₁₇ in Table 1A is R.
46. The CD3 binding molecule of any one of embodiments 2 to 44, wherein the amino acid designated X₁₇ in Table 1A is S.
47. The CD3 binding molecule of any one of embodiments 2 to 46, wherein the amino acid designated X₁₈ in Table 1A is V.
48. The CD3 binding molecule of any one of embodiments 2 to 46, wherein the amino acid designated X₁₈ in Table 1A is T.
49. The CD3 binding molecule of any one of embodiments 2 to 48, wherein the amino acid designated X₁₉ in Table 1A is N.
50. The CD3 binding molecule of any one of embodiments 2 to 48, wherein the amino acid designated X₁₉ in Table 1A is T.
51. The CD3 binding molecule of any one of embodiments 2 to 50, wherein the amino acid designated X₂₀ in Table 1A is R.
52. The CD3 binding molecule of any one of embodiments 2 to 50, wherein the amino acid designated X₂₀ in Table 1A is L.
53. The CD3 binding molecule of any one of embodiments 2 to 52, wherein the amino acid designated X₂₁ in Table 1A is F.
54. The CD3 binding molecule of any one of embodiments 2 to 52, wherein the amino acid designated X₂₁ in Table 1A is E.
55. The CD3 binding molecule of any one of embodiments 2 to 54, wherein the amino acid designated X₂₂ in Table 1A is S.
56. The CD3 binding molecule of any one of embodiments 2 to 54, wherein the amino acid designated X₂₂ in Table 1A is Y.
57. The CD3 binding molecule of any one of embodiments 2 to 56, wherein the amino acid designated X₂₃ in Table 1A is S.
58. The CD3 binding molecule of any one of embodiments 2 to 56, wherein the amino acid designated X₂₃ in Table 1A is Y.
59. The CD3 binding molecule of any one of embodiments 2 to 58, wherein the amino acid designated X₂₄ in Table 1A is S.
60. The CD3 binding molecule of any one of embodiments 2 to 58, wherein the amino acid designated X₂₄ in Table 1A is A.
61. The CD3 binding molecule of any one of embodiments 2 to 60, wherein the amino acid designated X₂₅ in Table 1A is H.
62. The CD3 binding molecule of any one of embodiments 2 to 60, wherein the amino acid designated X₂₅ in Table 1A is T.
63. The CD3 binding molecule of any one of embodiments 2 to 62, wherein the amino acid designated X₂₆ in Table 1A is F.
64. The CD3 binding molecule of any one of embodiments 2 to 62, wherein the amino acid designated X₂₆ in Table 1A is Y.
65. The CD3 binding molecule of any one of embodiments 2 to 64, wherein the amino acid designated X₂₇ in Table 1A is W.
66. The CD3 binding molecule of any one of embodiments 2 to 64, wherein the amino acid designated X₂₇ in Table 1A is Y.
67. The CD3 binding molecule of any one of embodiments 2 to 66, which comprises the CDR-H1 sequence C1-1.
68. The CD3 binding molecule of any one of embodiments 2 to 66, which comprises the CDR-H1 sequence C1-2.
69. The CD3 binding molecule of any one of embodiments 2 to 66, which comprises the CDR-H1 sequence C1-3.
70. The CD3 binding molecule of any one of embodiments 2 to 66, which comprises the CDR-H1 sequence C1-4.
71. The CD3 binding molecule of any one of embodiments 2 to 70, which comprises the CDR-H2 sequence C1-5.
72. The CD3 binding molecule of any one of embodiments 2 to 70, which comprises the CDR-H2 sequence C1-6.
73. The CD3 binding molecule of any one of embodiments 2 to 70, which comprises the CDR-H2 sequence C1-7.
74. The CD3 binding molecule of any one of embodiments 2 to 73, which comprises the CDR-H3 sequence C1-8.
75. The CD3 binding molecule of any one of embodiments 2 to 73, which comprises the CDR-H3 sequence C1-9.
76. The CD3 binding molecule of any one of embodiments 2 to 73, which comprises the CDR-H3 sequence C1-10.
77. The CD3 binding molecule of any one of embodiments 2 to 73, which comprises the CDR-H3 sequence C1-11.
78. The CD3 binding molecule of any one of embodiments 2 to 77, which comprises the CDR-L1 sequence C1-12.
79. The CD3 binding molecule of any one of embodiments 2 to 77, which comprises the CDR-L1 sequence C1-13.
80. The CD3 binding molecule of any one of embodiments 2 to 77, which comprises the CDR-L1 sequence C1-14.
81. The CD3 binding molecule of any one of embodiments 2 to 77, which comprises the CDR-L1 sequence C1-15.
82. The CD3 binding molecule of any one of embodiments 2 to 77, which comprises the CDR-L1 sequence C1-16.
83. The CD3 binding molecule of any one of embodiments 2 to 77, which comprises the CDR-L1 sequence C1-17.
84. The CD3 binding molecule of any one of embodiments 2 to 83, which comprises the CDR-L2 sequence C1-18.
85. The CD3 binding molecule of any one of embodiments 2 to 83, which comprises the CDR-L2 sequence C1-19.
86. The CD3 binding molecule of any one of embodiments 2 to 85, which comprises the CDR-L3 sequence C1-20.
87. The CD3 binding molecule of any one of embodiments 2 to 85, which comprises the CDR-L3 sequence C1-21.
88. The CD3 binding molecule of any one of embodiments 2 to 85, which comprises the CDR-L3 sequence C1-22.
89. The CD3 binding molecule of any one of embodiments 2 to 85, which comprises the CDR-L3 sequence C1-23.
90. The CD3 binding molecule of embodiment 1, which comprises a CDR-H1 sequence, a CDR-H2 sequence, a CDR-H3 sequence, a CDR-L1 sequence, a CDR-L2 sequence, and a CDR-L3 sequence set forth in Table 1B.
91. The CD3 binding molecule of embodiment 90, wherein the amino acid designated X₂₈ in Table 1B is V.
92. The CD3 binding molecule of embodiment 90, wherein the amino acid designated X₂₈ in Table 1B is I.
93. The CD3 binding molecule of any one of embodiments 90 to 92, wherein the amino acid designated X₂₉ in Table 1B is F.
94. The CD3 binding molecule of any one of embodiments 90 to 92, wherein the amino acid designated X₂₉ in Table 1B is Y.
95. The CD3 binding molecule of any one of embodiments 90 to 94, wherein the amino acid designated X₃₀ in Table 1B is N.
96. The CD3 binding molecule of any one of embodiments 90 to 94, wherein the amino acid designated X₃₀ in Table 1B is S.
97. The CD3 binding molecule of any one of embodiments 90 to 96, wherein the amino acid designated X₃₁ in Table 1B is A.
98. The CD3 binding molecule of any one of embodiments 90 to 96, wherein the amino acid designated X₃₁ in Table 1B is S.
99. The CD3 binding molecule of any one of embodiments 90 to 98, wherein the amino acid designated X₃₂ in Table 1B is T.
100. The CD3 binding molecule of any one of embodiments 90 to 98, wherein the amino acid designated X₃₂ in Table 1B is K.
101. The CD3 binding molecule of any one of embodiments 90 to 100, wherein the amino acid designated X₃₃ in Table 1B is T.
102. The CD3 binding molecule of any one of embodiments 90 to 100, wherein the amino acid designated X₃₃ in Table 1B is A.
103. The CD3 binding molecule of any one of embodiments 90 to 102, wherein the amino acid designated X₃₄ in Table 1B is S.
104. The CD3 binding molecule of any one of embodiments 90 to 102, wherein the amino acid designated X₃₄ in Table 1B is R.
105. The CD3 binding molecule of any one of embodiments 90 to 104, wherein the amino acid designated X₃₅ in Table 1B is N.
106. The CD3 binding molecule of any one of embodiments 90 to 104, wherein the amino acid designated X₃₅ in Table 1B is G.
107. The CD3 binding molecule of any one of embodiments 90 to 106, wherein the amino acid designated X₃₆ in Table 1B is S.
108. The CD3 binding molecule of any one of embodiments 90 to 106, wherein the amino acid designated X₃₆ in Table 1B is A.
109. The CD3 binding molecule of any one of embodiments 90 to 108, wherein the amino acid designated X₃₇ in Table 1B is A.
110. The CD3 binding molecule of any one of embodiments 90 to 108, wherein the amino acid designated X₃₇ in Table 1B is T.
111. The CD3 binding molecule of any one of embodiments 90 to 108, wherein the amino acid designated X₃₇ in Table 1B is S.
112. The CD3 binding molecule of any one of embodiments 90 to 111, wherein the amino acid designated X₃₈ in Table 1B is N.
113. The CD3 binding molecule of any one of embodiments 90 to 111, wherein the amino acid designated X₃₈ in Table 1B is D.
114. The CD3 binding molecule of any one of embodiments 90 to 113, wherein the amino acid designated X₃₉ in Table 1B is N.
115. The CD3 binding molecule of any one of embodiments 90 to 113, wherein the amino acid designated X₃₉ in Table 1B is K.
116. The CD3 binding molecule of any one of embodiments 90 to 115, wherein the amino acid designated X₄₀ in Table 1B is D.
117. The CD3 binding molecule of any one of embodiments 90 to 115, wherein the amino acid designated X₄₀ in Table 1B is N.
118. The CD3 binding molecule of any one of embodiments 90 to 117, wherein the amino acid designated X₄₁ in Table 1B is H.
119. The CD3 binding molecule of any one of embodiments 90 to 117, wherein the amino acid designated X₄₁ in Table 1B is N.
120. The CD3 binding molecule of any one of embodiments 90 to 119, wherein the amino acid designated X₄₂ in Table 1B is Q.
121. The CD3 binding molecule of any one of embodiments 90 to 119, wherein the amino acid designated X₄₂ in Table 1B is E.
122. The CD3 binding molecule of any one of embodiments 90 to 121, wherein the amino acid designated X₄₃ in Table 1B is R.
123. The CD3 binding molecule of any one of embodiments 90 to 121, wherein the amino acid designated X₄₃ in Table 1B is S.
124. The CD3 binding molecule of any one of embodiments 90 to 121, wherein the amino acid designated X₄₃ in Table 1B is G.
125. The CD3 binding molecule of any one of embodiments 90 to 124, which comprises the CDR-H1 sequence C2-1.
126. The CD3 binding molecule of any one of embodiments 90 to 124, which comprises the CDR-H1 sequence C2-2.
127. The CD3 binding molecule of any one of embodiments 90 to 124, which comprises the CDR-H1 sequence C2-3.
128. The CD3 binding molecule of any one of embodiments 90 to 124, which comprises the CDR-H1 sequence C2-4.
129. The CD3 binding molecule of any one of embodiments 90 to 128, which comprises the CDR-H2 sequence C2-5.
130. The CD3 binding molecule of any one of embodiments 90 to 128, which comprises the CDR-H2 sequence C2-6.
131. The CD3 binding molecule of any one of embodiments 90 to 128, which comprises the CDR-H2 sequence C2-7.
132. The CD3 binding molecule of any one of embodiments 90 to 131, which comprises the CDR-H3 sequence C2-8.
133. The CD3 binding molecule of any one of embodiments 90 to 131, which comprises the CDR-H3 sequence C2-9.
134. The CD3 binding molecule of any one of embodiments 90 to 133, which comprises the CDR-L1 sequence C2-10.
135. The CD3 binding molecule of any one of embodiments 90 to 133, which comprises the CDR-L1 sequence C2-11.
136. The CD3 binding molecule of any one of embodiments 90 to 133, which comprises the CDR-L1 sequence C2-12.
137. The CD3 binding molecule of any one of embodiments 90 to 136, which comprises the CDR-L2 sequence C2-13.
138. The CD3 binding molecule of any one of embodiments 90 to 136, which comprises the CDR-L2 sequence C2-14.
139. The CD3 binding molecule of any one of embodiments 90 to 136, which comprises the CDR-L2 sequence C2-15.
140. The CD3 binding molecule of any one of embodiments 90 to 139, which comprises the CDR-L3 sequence C2-16.
141. The CD3 binding molecule of any one of embodiments 90 to 139, which comprises the CDR-L3 sequence C2-17.
142. The CD3 binding molecule of embodiment 1, which comprises a CDR-H1 sequence, a CDR-H2 sequence, a CDR-H3 sequence, a CDR-L1 sequence, a CDR-L2 sequence, and a CDR-L3 sequence set forth in Table 10.
143. The CD3 binding molecule of embodiment 142, wherein the amino acid designated X₄₄ in Table 10 is G.
144. The CD3 binding molecule of embodiment 142, wherein the amino acid designated X₄₄ in Table 10 is A.
145. The CD3 binding molecule of any one of embodiments 142 to 144, wherein the amino acid designated X₄₅ in Table 10 is H.
146. The CD3 binding molecule of any one of embodiments 142 to 144, wherein the amino acid designated X₄₅ in Table 10 is N.
147. The CD3 binding molecule of any one of embodiments 142 to 146, wherein the amino acid designated X₄₆ in Table 10 is D.
148. The CD3 binding molecule of any one of embodiments 142 to 146, wherein the amino acid designated X₄₆ in Table 10 is G.
149. The CD3 binding molecule of any one of embodiments 142 to 148, wherein the amino acid designated X₄₇ in Table 10 is A.
150. The CD3 binding molecule of any one of embodiments 142 to 148, wherein the amino acid designated X₄₇ in Table 10 is G.
151. The CD3 binding molecule of any one of embodiments 142 to 150, wherein the amino acid designated X₄₈ in Table 10 is N.
152. The CD3 binding molecule of any one of embodiments 142 to 150, wherein the amino acid designated X₄₈ in Table 10 is K.
153. The CD3 binding molecule of any one of embodiments 142 to 152, wherein the amino acid designated X₄₉ in Table 10 is V.
154. The CD3 binding molecule of any one of embodiments 142 to 152, wherein the amino acid designated X₄₉ in Table 10 is A.
155. The CD3 binding molecule of any one of embodiments 142 to 154, wherein the amino acid designated X₅₀ in Table 10 is N.
156. The CD3 binding molecule of any one of embodiments 142 to 154, wherein the amino acid designated X₅₀ in Table 10 is V.
157. The CD3 binding molecule of any one of embodiments 142 to 156, wherein the amino acid designated X₅₁ in Table 10 is A.
158. The CD3 binding molecule of any one of embodiments 142 to 156, wherein the amino acid designated X₅₁ in Table 10 is V.
159. The CD3 binding molecule of any one of embodiments 142 to 158, wherein the amino acid designated X₅₂ in Table 10 is Y.
160. The CD3 binding molecule of any one of embodiments 142 to 158, wherein the amino acid designated X₅₂ in Table 10 is F.
161. The CD3 binding molecule of any one of embodiments 142 to 160, wherein the amino acid designated X₅₃ in Table 10 is I.
162. The CD3 binding molecule of any one of embodiments 142 to 160, wherein the amino acid designated X₅₃ in Table 10 is V.
163. The CD3 binding molecule of any one of embodiments 142 to 162, wherein the amino acid designated X₅₄ in Table 10 is I.
164. The CD3 binding molecule of any one of embodiments 142 to 162, wherein the amino acid designated X₅₄ in Table 10 is H.
165. The CD3 binding molecule of any one of embodiments 142 to 164, which comprises the CDR-H1 sequence C3-1.
166. The CD3 binding molecule of any one of embodiments 142 to 164, which comprises the CDR-H1 sequence C3-2.
167. The CD3 binding molecule of any one of embodiments 142 to 164, which comprises the CDR-H1 sequence C3-3.
168. The CD3 binding molecule of any one of embodiments 142 to 164, which comprises the CDR-H1 sequence C3-4.
169. The CD3 binding molecule of any one of embodiments 142 to 168, which comprises the CDR-H2 sequence C3-5.
170. The CD3 binding molecule of any one of embodiments 142 to 168, which comprises the CDR-H2 sequence C3-6.
171. The CD3 binding molecule of any one of embodiments 142 to 168, which comprises the CDR-H2 sequence C3-7.
172. The CD3 binding molecule of any one of embodiments 142 to 171, which comprises the CDR-H3 sequence C3-8.
173. The CD3 binding molecule of any one of embodiments 142 to 171, which comprises the CDR-H3 sequence C3-9.
174. The CD3 binding molecule of any one of embodiments 142 to 173, which comprises the CDR-L1 sequence C3-10.
175. The CD3 binding molecule of any one of embodiments 142 to 173, which comprises the CDR-L1 sequence C3-11.
176. The CD3 binding molecule of any one of embodiments 142 to 173, which comprises the CDR-L1 sequence C3-12.
177. The CD3 binding molecule of any one of embodiments 142 to 176, which comprises the CDR-L2 sequence C3-13.
178. The CD3 binding molecule of any one of embodiments 142 to 176, which comprises the CDR-L2 sequence C3-14.
179. The CD3 binding molecule of any one of embodiments 142 to 178, which comprises the CDR-L3 sequence C3-15.
180. The CD3 binding molecule of any one of embodiments 142 to 178, which comprises the CDR-L3 sequence C3-16.
181. A CD3 binding molecule that specifically binds to human CD3 and comprises CDR-H1 CDR-H2, and CDR-H3 sequences set forth in Table 1D-1, Table 1E-1, Table 1F-1, Table 1G-1, Table 1H-1, or Table 1I-1, and the corresponding CDR-L1, CDR-L2, and CDR-L3 sequences set forth in Table 1D-2, Table 1E-2, Table 1F-2, Table 1G-2, Table 1H-2, or Table 1I-2, respectfully.
182. The CD3 binding molecule of embodiment 181, which comprises CDR-H1, CDR-H2, and CDR-H3 sequences set forth in Table 1D-1 and the corresponding CDR-L1, CDR-L2, and CDR-L3 sequences set forth in Table 1D-2.
183. The CD3 binding molecule of embodiment 181, which comprises CDR-H1, CDR-H2, and CDR-H3 sequences set forth in Table 1E-1 and the corresponding CDR-L1, CDR-L2, and CDR-L3 sequences set forth in Table 1E-2.
184. The CD3 binding molecule of embodiment 181, which comprises CDR-H1, CDR-H2, and CDR-H3 sequences set forth in Table 1F-1 and the corresponding CDR-L1, CDR-L2, and CDR-L3 sequences set forth in Table 1F-2.
185. The CD3 binding molecule of embodiment 181, which comprises CDR-H1, CDR-H2, and CDR-H3 sequences set forth in Table 1G-1 and the corresponding CDR-L1, CDR-L2, and CDR-L3 sequences set forth in Table 1G-2.
186. The CD3 binding molecule of embodiment 181, which comprises CDR-H1, CDR-H2, and CDR-H3 sequences set forth in Table 1H-1 and the corresponding CDR-L1, CDR-L2, and CDR-L3 sequences set forth in Table 1H-2.
187. The CD3 binding molecule of embodiment 181, which comprises CDR-H1, CDR-H2, and CDR-H3 sequences set forth in Table 1I-1 and the corresponding CDR-L1, CDR-L2, and CDR-L3 sequences set forth in Table 1I-2.
188. The CD3 binding molecule of any one of embodiments 182 to 187, wherein the CDR-H1, CDR-H2, CDR-H3, CDR-L1, CDR-L2, and CDR-L3 sequences are those of NOV292.
189. The CD3 binding molecule of any one of embodiments 182 to 187, wherein the CDR-H1, CDR-H2, CDR-H3, CDR-L1, CDR-L2, and CDR-L3 sequences are those of NOV123.
190. The CD3 binding molecule of any one of embodiments 182 to 187, wherein the CDR-H1, CDR-H2, CDR-H3, CDR-L1, CDR-L2, and CDR-L3 sequences are those of Sp10b.
191. The CD3 binding molecule of any one of embodiments 182 to 187, wherein the CDR-H1, CDR-H2, CDR-H3, CDR-L1, CDR-L2, and CDR-L3 sequences are those of NOV453.
192. The CD3 binding molecule of any one of embodiments 182 to 187, wherein the CDR-H1, CDR-H2, CDR-H3, CDR-L1, CDR-L2, and CDR-L3 sequences are those of NOV229.
193. The CD3 binding molecule of any one of embodiments 182 to 187, wherein the CDR-H1, CDR-H2, CDR-H3, CDR-L1, CDR-L2, and CDR-L3 sequences are those of NOV110.
194. The CD3 binding molecule of any one of embodiments 182 to 187, wherein the CDR-H1, CDR-H2, CDR-H3, CDR-L1, CDR-L2, and CDR-L3 sequences are those of NOV832.
195. The CD3 binding molecule of any one of embodiments 182 to 187, wherein the CDR-H1, CDR-H2, CDR-H3, CDR-L1, CDR-L2, and CDR-L3 sequences are those of NOV589.
196. The CD3 binding molecule of any one of embodiments 182 to 187, wherein the CDR-H1, CDR-H2, CDR-H3, CDR-L1, CDR-L2, and CDR-L3 sequences are those of NOV580.
197. The CD3 binding molecule of any one of embodiments 182 to 187, wherein the CDR-H1, CDR-H2, CDR-H3, CDR-L1, CDR-L2, and CDR-L3 sequences are those of NOV567.
198. The CD3 binding molecule of any one of embodiments 182 to 187, wherein the CDR-H1, CDR-H2, CDR-H3, CDR-L1, CDR-L2, and CDR-L3 sequences are those of NOV221.
199. The CD3 binding molecule of any one of embodiments 182 to 187, wherein the CDR-H1, CDR-H2, CDR-H3, CDR-L1, CDR-L2, and CDR-L3 sequences are those of CD3_sp11a_bkm1.
200. The CD3 binding molecule of any one of embodiments 182 to 187, wherein the CDR-H1, CDR-H2, CDR-H3, CDR-L1, CDR-L2, and CDR-L3 sequences are those of CD3_SP11a_bkm2.
201. The CD3 binding molecule of any one of embodiments 182 to 187, wherein the CDR-H1, CDR-H2, CDR-H3, CDR-L1, CDR-L2, and CDR-L3 sequences are those of CD3_sp11a_hz0.
202. The CD3 binding molecule of any one of embodiments 182 to 187, wherein the CDR-H1, CDR-H2, CDR-H3, CDR-L1, CDR-L2, and CDR-L3 sequences are those of CD3_SP11A_HZ1.
203. The CD3 binding molecule of any one of embodiments 182 to 187, wherein the CDR-H1, CDR-H2, CDR-H3, CDR-L1, CDR-L2, and CDR-L3 sequences are those of CD3_sp11a_sansPTM_hz1.
204. The CD3 binding molecule of any one of embodiments 182 to 187, wherein the CDR-H1, CDR-H2, CDR-H3, CDR-L1, CDR-L2, and CDR-L3 sequences are those of CD3_sp11a_sansPTM_rat.
205. The CD3 binding molecule of any one of embodiments 182 to 187, wherein the CDR-H1, CDR-H2, CDR-H3, CDR-L1, CDR-L2, and CDR-L3 sequences are those of CD3_sp11a_VHVL_YY.
206. The CD3 binding molecule of any one of embodiments 182 to 187, wherein the CDR-H1, CDR-H2, CDR-H3, CDR-L1, CDR-L2, and CDR-L3 sequences are those of CD3_SP11A_VHVL_SS.
207. The CD3 binding molecule of any one of embodiments 182 to 187, wherein the CDR-H1, CDR-H2, CDR-H3, CDR-L1, CDR-L2, and CDR-L3 sequences are those of CD3_SP11A_VHVL_WS.
208. The CD3 binding molecule of any one of embodiments 182 to 187, wherein the CDR-H1, CDR-H2, CDR-H3, CDR-L1, CDR-L2, and CDR-L3 sequences are those of CD3_sp11a_VHVL_SW.
209. The CD3 binding molecule of any one of embodiments 182 to 187, wherein the CDR-H1, CDR-H2, CDR-H3, CDR-L1, CDR-L2, and CDR-L3 sequences are those of CD3_SP11A_VHVL_TT.
210. The CD3 binding molecule of any one of embodiments 182 to 187, wherein the CDR-H1, CDR-H2, CDR-H3, CDR-L1, CDR-L2, and CDR-L3 sequences are those of CD3_SP11A_VHVL_TW.
211. The CD3 binding molecule of any one of embodiments 182 to 187, wherein the CDR-H1, CDR-H2, CDR-H3, CDR-L1, CDR-L2, and CDR-L3 sequences are those of CD3_SP11A_VHVL_WT.
212. The CD3 binding molecule of any one of embodiments 182 to 187, wherein the CDR-H1, CDR-H2, CDR-H3, CDR-L1, CDR-L2, and CDR-L3 sequences are those of CD3_SP11A VH3_VLK_3.
213. The CD3 binding molecule of any one of embodiments 182 to 187, wherein the CDR-H1, CDR-H2, CDR-H3, CDR-L1, CDR-L2, and CDR-L3 sequences are those of CD3_sp11a_VH1_VK2.
214. The CD3 binding molecule of any one of embodiments 182 to 187, wherein the CDR-H1, CDR-H2, CDR-H3, CDR-L1, CDR-L2, and CDR-L3 sequences are those of CD3_SP11A_VH3_VLK1.
215. The CD3 binding molecule of any one of embodiments 182 to 187, wherein the CDR-H1, CDR-H2, CDR-H3, CDR-L1, CDR-L2, and CDR-L3 sequences are those of CD3_SP11A_VH5_VK2.
216. The CD3 binding molecule of any one of embodiments 182 to 187, wherein the CDR-H1, CDR-H2, CDR-H3, CDR-L1, CDR-L2, and CDR-L3 sequences are those of CD3_sp9aFW1_VL_VH_S56G.
217. The CD3 binding molecule of any one of embodiments 182 to 187, wherein the CDR-H1, CDR-H2, CDR-H3, CDR-L1, CDR-L2, and CDR-L3 sequences are those of CD3_SP9AFW4_VL_VH_S56G.
218. The CD3 binding molecule of any one of embodiments 182 to 187, wherein the CDR-H1, CDR-H2, CDR-H3, CDR-L1, CDR-L2, and CDR-L3 sequences are those of CD3_sp9aFW1_VL_VH.
219. The CD3 binding molecule of any one of embodiments 182 to 187, wherein the CDR-H1, CDR-H2, CDR-H3, CDR-L1, CDR-L2, and CDR-L3 sequences are those of CD3_sp9aFW4_VLVH.
220. The CD3 binding molecule of any one of embodiments 182 to 187, wherein the CDR-H1, CDR-H2, CDR-H3, CDR-L1, CDR-L2, and CDR-L3 sequences are those of CD3_sp9arabtor_VHVL.
221. The CD3 binding molecule of any one of embodiments 182 to 187, wherein the CDR-H1, CDR-H2, CDR-H3, CDR-L1, CDR-L2, and CDR-L3 sequences are those of CD3_sp9arabtor_VLVH.
222. The CD3 binding molecule of any one of embodiments 182 to 187, wherein the CDR-H1, CDR-H2, CDR-H3, CDR-L1, CDR-L2, and CDR-L3 sequences are those of CD3_sp11a_VHVL_YY_SANSPTM.
223. The CD3 binding molecule of any one of embodiments 182 to 187, wherein the CDR-H1, CDR-H2, CDR-H3, CDR-L1, CDR-L2, and CDR-L3 sequences are those of CD3_sp11a_VHVL_YY_SANSPTM_Y.
224. The CD3 binding molecule of any one of embodiments 182 to 187, wherein the CDR-H1, CDR-H2, CDR-H3, CDR-L1, CDR-L2, and CDR-L3 sequences are those of CD3_sp11a_VHVL_YY_SANSPTM_S.
225. The CD3 binding molecule of any one of embodiments 182 to 187, wherein the CDR-H1, CDR-H2, CDR-H3, CDR-L1, CDR-L2, and CDR-L3 sequences are those of CD3_sp11a_VHVL_YY_Y.
226. The CD3 binding molecule of any one of embodiments 182 to 187, wherein the CDR-H1, CDR-H2, CDR-H3, CDR-L1, CDR-L2, and CDR-L3 sequences are those of CD3_sp11a_VHVL_YY_s.
227. The CD3 binding molecule of any one of embodiments 182 to 187, wherein the CDR-H1, CDR-H2, CDR-H3, CDR-L1, CDR-L2, and CDR-L3 sequences are those of CD3_sp11a_VHVL_SS_SANSPTM.
228. The CD3 binding molecule of any one of embodiments 182 to 187, wherein the CDR-H1, CDR-H2, CDR-H3, CDR-L1, CDR-L2, and CDR-L3 sequences are those of CD3_sp11a_VHVL_SS_SANSPTM_Y.
229. The CD3 binding molecule of any one of embodiments 182 to 187, wherein the CDR-H1, CDR-H2, CDR-H3, CDR-L1, CDR-L2, and CDR-L3 sequences are those of CD3_sp11a_VHVL_SS_SANSPTM_S.
230. The CD3 binding molecule of any one of embodiments 182 to 187, wherein the CDR-H1, CDR-H2, CDR-H3, CDR-L1, CDR-L2, and CDR-L3 sequences are those of CD3_sp11a_VHVL_SS_Y.
231. The CD3 binding molecule of any one of embodiments 182 to 187, wherein the CDR-H1, CDR-H2, CDR-H3, CDR-L1, CDR-L2, and CDR-L3 sequences are those of CD3_sp11a_VHVL_SS_S.
232. The CD3 binding molecule of any one of embodiments 182 to 187, wherein the CDR-H1, CDR-H2, CDR-H3, CDR-L1, CDR-L2, and CDR-L3 sequences are those of CD3_sp11a_VHVL_SS_SANSPTM.
233. The CD3 binding molecule of any one of embodiments 182 to 187, wherein the CDR-H1, CDR-H2, CDR-H3, CDR-L1, CDR-L2, and CDR-L3 sequences are those of CD3_sp11a_VHVL_WS_SANSPTM_Y.
234. The CD3 binding molecule of any one of embodiments 182 to 187, wherein the CDR-H1, CDR-H2, CDR-H3, CDR-L1, CDR-L2, and CDR-L3 sequences are those of CD3_sp11a_VHVL_WS_SANSPTM_S.
235. The CD3 binding molecule of any one of embodiments 182 to 187, wherein the CDR-H1, CDR-H2, CDR-H3, CDR-L1, CDR-L2, and CDR-L3 sequences are those of CD3_sp11a_VHVL_WS_Y.
236. The CD3 binding molecule of any one of embodiments 182 to 187, wherein the CDR-H1, CDR-H2, CDR-H3, CDR-L1, CDR-L2, and CDR-L3 sequences are those of CD3_sp11a_VHVL_WS_S.
237. The CD3 binding molecule of any one of embodiments 182 to 187, wherein the CDR-H1, CDR-H2, CDR-H3, CDR-L1, CDR-L2, and CDR-L3 sequences are those of CD3_sp11a_VHVL_WS_SANSPTM.
238. The CD3 binding molecule of any one of embodiments 182 to 187, wherein the CDR-H1, CDR-H2, CDR-H3, CDR-L1, CDR-L2, and CDR-L3 sequences are those of CD3_sp11a_VHVL_SW_SANSPTM_Y.
239. The CD3 binding molecule of any one of embodiments 182 to 187, wherein the CDR-H1, CDR-H2, CDR-H3, CDR-L1, CDR-L2, and CDR-L3 sequences are those of CD3_sp11a_VHVL_SW_SANSPTM_S.
240. The CD3 binding molecule of any one of embodiments 182 to 187, wherein the CDR-H1, CDR-H2, CDR-H3, CDR-L1, CDR-L2, and CDR-L3 sequences are those of CD3_sp11a_VHVL_SW_Y.
241. The CD3 binding molecule of any one of embodiments 182 to 187, wherein the CDR-H1, CDR-H2, CDR-H3, CDR-L1, CDR-L2, and CDR-L3 sequences are those of CD3_sp11a_VHVL_SW_S.
242. The CD3 binding molecule of any one of embodiments 182 to 187, wherein the CDR-H1, CDR-H2, CDR-H3, CDR-L1, CDR-L2, and CDR-L3 sequences are those of CD3_sp11a_VHVL_SW_SANSPTM.
243. The CD3 binding molecule of any one of embodiments 182 to 187, wherein the CDR-H1, CDR-H2, CDR-H3, CDR-L1, CDR-L2, and CDR-L3 sequences are those of CD3_sp11a_VHVL_TW_SANSPTM_Y.
244. The CD3 binding molecule of any one of embodiments 182 to 187, wherein the CDR-H1, CDR-H2, CDR-H3, CDR-L1, CDR-L2, and CDR-L3 sequences are those of CD3_sp11a_VHVL_TW_SANSPTM_S.
245. The CD3 binding molecule of any one of embodiments 182 to 187, wherein the CDR-H1, CDR-H2, CDR-H3, CDR-L1, CDR-L2, and CDR-L3 sequences are those of CD3_sp11a_VHVL_TW_Y.
246. The CD3 binding molecule of any one of embodiments 182 to 187, wherein the CDR-H1, CDR-H2, CDR-H3, CDR-L1, CDR-L2, and CDR-L3 sequences are those of CD3_sp11a_VHVL_TW_S.
247. The CD3 binding molecule of any one of embodiments 182 to 187, wherein the CDR-H1, CDR-H2, CDR-H3, CDR-L1, CDR-L2, and CDR-L3 sequences are those of CD3_sp11a_VHVL_TW_SANSPTM.
248. The CD3 binding molecule of any one of embodiments 182 to 187, wherein the CDR-H1, CDR-H2, CDR-H3, CDR-L1, CDR-L2, and CDR-L3 sequences are those of CD3_sp11a_VHVL_TT_SANSPTM_Y.
249. The CD3 binding molecule of any one of embodiments 182 to 187, wherein the CDR-H1, CDR-H2, CDR-H3, CDR-L1, CDR-L2, and CDR-L3 sequences are those of CD3_sp11a_VHVL_TT_SANSPTM_S.
250. The CD3 binding molecule of any one of embodiments 182 to 187, wherein the CDR-H1, CDR-H2, CDR-H3, CDR-L1, CDR-L2, and CDR-L3 sequences are those of CD3_sp11a_VHVL_TT_Y.
251. The CD3 binding molecule of any one of embodiments 182 to 187, wherein the CDR-H1, CDR-H2, CDR-H3, CDR-L1, CDR-L2, and CDR-L3 sequences are those of CD3_sp11a_VHVL_TT_S.
252. The CD3 binding molecule of any one of embodiments 182 to 187, wherein the CDR-H1, CDR-H2, CDR-H3, CDR-L1, CDR-L2, and CDR-L3 sequences are those of CD3_sp11a_VHVL_TT_SANSPTM.
253. The CD3 binding molecule of any one of embodiments 182 to 187, wherein the CDR-H1, CDR-H2, CDR-H3, CDR-L1, CDR-L2, and CDR-L3 sequences are those of CD3_SP11AVH3_VLK_3_Y.
254. The CD3 binding molecule of any one of embodiments 182 to 187, wherein the CDR-H1, CDR-H2, CDR-H3, CDR-L1, CDR-L2, and CDR-L3 sequences are those of CD3_SP11AVH3_VLK_3_S.
255. The CD3 binding molecule of any one of embodiments 182 to 187, wherein the CDR-H1, CDR-H2, CDR-H3, CDR-L1, CDR-L2, and CDR-L3 sequences are those of CD3_SP11AVH3_VLK_3_Y_PTM.
256. The CD3 binding molecule of any one of embodiments 182 to 187, wherein the CDR-H1, CDR-H2, CDR-H3, CDR-L1, CDR-L2, and CDR-L3 sequences are those of CD3_SP11AVH3_VLK_3_S_PTM.
257. The CD3 binding molecule of any one of embodiments 182 to 187, wherein the CDR-H1, CDR-H2, CDR-H3, CDR-L1, CDR-L2, and CDR-L3 sequences are those of CD3_SP11AVH3_VLK_3_Y_SW.
258. The CD3 binding molecule of any one of embodiments 182 to 187, wherein the CDR-H1, CDR-H2, CDR-H3, CDR-L1, CDR-L2, and CDR-L3 sequences are those of CD3_SP11AVH3_VLK_3_S_SW.
259. The CD3 binding molecule of any one of embodiments 182 to 187, wherein the CDR-H1, CDR-H2, CDR-H3, CDR-L1, CDR-L2, and CDR-L3 sequences are those of CD3_SP11AVH3_VLK_3_Y_PTM_SW.
260. The CD3 binding molecule of any one of embodiments 182 to 187, wherein the CDR-H1, CDR-H2, CDR-H3, CDR-L1, CDR-L2, and CDR-L3 sequences are those of CD3_SP11AVH3_VLK_3_S_SWPTM.
261. The CD3 binding molecule of any one of embodiments 182 to 187, wherein the CDR-H1, CDR-H2, CDR-H3, CDR-L1, CDR-L2, and CDR-L3 sequences are those of CD3_SP11AVH3_VLK_SWPTM.
262. The CD3 binding molecule of any one of embodiments 182 to 187, wherein the CDR-H1, CDR-H2, CDR-H3, CDR-L1, CDR-L2, and CDR-L3 sequences are those of CD3_SP11AVH3_VLK_3_SW.
263. The CD3 binding molecule of any one of embodiments 182 to 187, wherein the CDR-H1, CDR-H2, CDR-H3, CDR-L1, CDR-L2, and CDR-L3 sequences are those of CD3_sp11a_VH1_VK2_Y.
264. The CD3 binding molecule of any one of embodiments 182 to 187, wherein the CDR-H1, CDR-H2, CDR-H3, CDR-L1, CDR-L2, and CDR-L3 sequences are those of CD3_sp11a_VH1_VK2_S.
265. The CD3 binding molecule of any one of embodiments 182 to 187, wherein the CDR-H1, CDR-H2, CDR-H3, CDR-L1, CDR-L2, and CDR-L3 sequences are those of CD3_sp11a_VH1_VK2_Y_PTM.
266. The CD3 binding molecule of any one of embodiments 182 to 187, wherein the CDR-H1, CDR-H2, CDR-H3, CDR-L1, CDR-L2, and CDR-L3 sequences are those of CD3_sp11a_VH1_VK2_S_PTM.
267. The CD3 binding molecule of any one of embodiments 182 to 187, wherein the CDR-H1, CDR-H2, CDR-H3, CDR-L1, CDR-L2, and CDR-L3 sequences are those of CD3_sp11a_VH1_VK2_Y_SW.
268. The CD3 binding molecule of any one of embodiments 182 to 187, wherein the CDR-H1, CDR-H2, CDR-H3, CDR-L1, CDR-L2, and CDR-L3 sequences are those of CD3_sp11a_VH1_VK2_S_SW.
269. The CD3 binding molecule of any one of embodiments 182 to 187, wherein the CDR-H1, CDR-H2, CDR-H3, CDR-L1, CDR-L2, and CDR-L3 sequences are those of CD3_sp11a_VH1_VK2_Y_PTM.
270. The CD3 binding molecule of any one of embodiments 182 to 187, wherein the CDR-H1, CDR-H2, CDR-H3, CDR-L1, CDR-L2, and CDR-L3 sequences are those of CD3_sp11a_VH1_VK2_S_PTM_SW.
271. The CD3 binding molecule of any one of embodiments 182 to 187, wherein the CDR-H1, CDR-H2, CDR-H3, CDR-L1, CDR-L2, and CDR-L3 sequences are those of CD3_sp11a_VH1_VK2_SW.
272. The CD3 binding molecule of any one of embodiments 182 to 187, wherein the CDR-H1, CDR-H2, CDR-H3, CDR-L1, CDR-L2, and CDR-L3 sequences are those of CD3_sp11a_VH1_VK2_SW PTM.
273. The CD3 binding molecule of any one of embodiments 182 to 187, wherein the CDR-H1, CDR-H2, CDR-H3, CDR-L1, CDR-L2, and CDR-L3 sequences are those of CD3_SP11A_VH3_VLK1_Y.
274. The CD3 binding molecule of any one of embodiments 182 to 187, wherein the CDR-H1, CDR-H2, CDR-H3, CDR-L1, CDR-L2, and CDR-L3 sequences are those of CD3_SP11A_VH3_VLK1_S.
275. The CD3 binding molecule of any one of embodiments 182 to 187, wherein the CDR-H1, CDR-H2, CDR-H3, CDR-L1, CDR-L2, and CDR-L3 sequences are those of CD3_SP11A_VH3_VLK1_Y_PTM.
276. The CD3 binding molecule of any one of embodiments 182 to 187, wherein the CDR-H1, CDR-H2, CDR-H3, CDR-L1, CDR-L2, and CDR-L3 sequences are those of CD3_SP11A_VH3_VLK1_S_PTM.
277. The CD3 binding molecule of any one of embodiments 182 to 187, wherein the CDR-H1, CDR-H2, CDR-H3, CDR-L1, CDR-L2, and CDR-L3 sequences are those of CD3_SP11A_VH3_VLK1_Y_SW.
278. The CD3 binding molecule of any one of embodiments 182 to 187, wherein the CDR-H1, CDR-H2, CDR-H3, CDR-L1, CDR-L2, and CDR-L3 sequences are those of CD3_SP11A_VH3_VLK1_S_SW.
279. The CD3 binding molecule of any one of embodiments 182 to 187, wherein the CDR-H1, CDR-H2, CDR-H3, CDR-L1, CDR-L2, and CDR-L3 sequences are those of CD3_SP11A_VH3_VLK1_Y_PTM.
280. The CD3 binding molecule of any one of embodiments 182 to 187, wherein the CDR-H1, CDR-H2, CDR-H3, CDR-L1, CDR-L2, and CDR-L3 sequences are those of CD3_SP11A_VH3_VLK1_S_PTM_SW.
281. The CD3 binding molecule of any one of embodiments 182 to 187, wherein the CDR-H1, CDR-H2, CDR-H3, CDR-L1, CDR-L2, and CDR-L3 sequences are those of CD3_SP11A_VH3_VLK1PTM_SW.
282. The CD3 binding molecule of any one of embodiments 182 to 187, wherein the CDR-H1, CDR-H2, CDR-H3, CDR-L1, CDR-L2, and CDR-L3 sequences are those of CD3_SP11A_VH3_VLK1_SW.
283. The CD3 binding molecule of any one of embodiments 182 to 187, wherein the CDR-H1, CDR-H2, CDR-H3, CDR-L1, CDR-L2, and CDR-L3 sequences are those of CD3_SP11A_VH5_VK2_Y.
284. The CD3 binding molecule of any one of embodiments 182 to 187, wherein the CDR-H1, CDR-H2, CDR-H3, CDR-L1, CDR-L2, and CDR-L3 sequences are those of CD3_SP11A_VH5_VK2_S.
285. The CD3 binding molecule of any one of embodiments 182 to 187, wherein the CDR-H1, CDR-H2, CDR-H3, CDR-L1, CDR-L2, and CDR-L3 sequences are those of CD3_SP11A_VH5_VK2_Y_PTM.
286. The CD3 binding molecule of any one of embodiments 182 to 187, wherein the CDR-H1, CDR-H2, CDR-H3, CDR-L1, CDR-L2, and CDR-L3 sequences are those of CD3_SP11A_VH5_VK2_S_PTM.
287. The CD3 binding molecule of any one of embodiments 182 to 187, wherein the CDR-H1, CDR-H2, CDR-H3, CDR-L1, CDR-L2, and CDR-L3 sequences are those of CD3_SP11A_VH5_VK2_Y_SW.
288. The CD3 binding molecule of any one of embodiments 182 to 187, wherein the CDR-H1, CDR-H2, CDR-H3, CDR-L1, CDR-L2, and CDR-L3 sequences are those of CD3_SP11A_VH5_VK2_S_SW.
289. The CD3 binding molecule of any one of embodiments 182 to 187, wherein the CDR-H1, CDR-H2, CDR-H3, CDR-L1, CDR-L2, and CDR-L3 sequences are those of CD3_SP11A_VH5_VK2_Y_PTM_SW.
290. The CD3 binding molecule of any one of embodiments 182 to 187, wherein the CDR-H1, CDR-H2, CDR-H3, CDR-L1, CDR-L2, and CDR-L3 sequences are those of CD3_SP11A_VH5_VK2_S_PTM_SW.
291. The CD3 binding molecule of any one of embodiments 182 to 187, wherein the CDR-H1, CDR-H2, CDR-H3, CDR-L1, CDR-L2, and CDR-L3 sequences are those of CD3_SP11A_VH5_VK2_PTM_SW.
292. The CD3 binding molecule of any one of embodiments 182 to 187, wherein the CDR-H1, CDR-H2, CDR-H3, CDR-L1, CDR-L2, and CDR-L3 sequences are those of CD3_SP11A_VH5_VK2_SW.
293. A CD3 binding molecule that specifically binds to human CD3 and comprises:

[0808] (a) a heavy chain variable region comprising:
[0809] (i) a CDR-H1 comprising the amino acid sequence of any one of SEQ ID NOs:133,136, 139 and 142;
[0810] (ii) a CDR-H2 comprising the amino acid sequence of any one of SEQ ID NOs:134, 137, 140 and 143; and
[0811] (iii) a CDR-H3 comprising the amino acid sequence of any one of SEQ ID NOs:135, 138; 141 and 144;
[0812] and

[0813] (b) a light chain variable region comprising:
[0814] (i) a CDR-L1 comprising the amino acid sequence of any one of SEQ ID NOs:149, 152, 155 and 158;
[0815] (ii) a CDR-L2 comprising the amino acid sequence of any one of SEQ ID NOs:150, 153, 156 and 159; and
[0816] (iii) a CDR-L3 comprising the amino acid sequence of any one of SEQ ID NOs:151, 154, 157 and 160.
   294. The CD3 binding molecule of embodiment 293, in which the heavy chain variable region comprises a CDR-H1 comprising the amino acid sequence of SEQ ID NO:133, a CDR-H2 comprising the amino acid sequence of SEQ ID NO:134, and a CDR-H3 comprising the amino acid sequence of SEQ ID NO:135, and in which the light chain variable region comprises a CDR-L1 comprising the amino acid sequence of SEQ ID NO:149, a CDR-L2 comprising the amino acid sequence of SEQ ID NO:150, and a CDR-L3 comprising the amino acid sequence of SEQ ID NO:151.
   295. The CD3 binding molecule of embodiment 293, in which the heavy chain variable region comprises a CDR-H1 comprising the amino acid sequence of SEQ ID NO:136, a CDR-H2 comprising the amino acid sequence of SEQ ID NO:137, and a CDR-H3 comprising the amino acid sequence of SEQ ID NO:138, and in which the light chain variable region comprises a CDR-L1 comprising the amino acid sequence of SEQ ID NO:152, a CDR-L2 comprising the amino acid sequence of SEQ ID NO:153, and a CDR-L3 comprising the amino acid sequence of SEQ ID NO:154.
   296. The CD3 binding molecule of embodiment 293, in which the heavy chain variable region comprises a CDR-H1 comprising the amino acid sequence of SEQ ID NO:139, a CDR-H2 comprising the amino acid sequence of SEQ ID NO:140, and a CDR-H3 comprising the amino acid sequence of SEQ ID NO:141, and in which the light chain variable region comprises a CDR-L1 comprising the amino acid sequence of SEQ ID NO:155, a CDR-L2 comprising the amino acid sequence of SEQ ID NO:156, and a CDR-L3 comprising the amino acid sequence of SEQ ID NO:157.
   297. The CD3 binding molecule of embodiment 293, in which the heavy chain variable region comprises a CDR-H1 comprising the amino acid sequence of SEQ ID NO:142, a CDR-H2 comprising the amino acid sequence of SEQ ID NO:143, and a CDR-H3 comprising the amino acid sequence of SEQ ID NO:144, and in which the light chain variable region comprises a CDR-L1 comprising the amino acid sequence of SEQ ID NO:158, a CDR-L2 comprising the amino acid sequence of SEQ ID NO:159, and a CDR-L3 comprising the amino acid sequence of SEQ ID NO:160.
   298. A CD3 binding molecule that specifically binds to human CD3 and comprises:

[0817] (a) a heavy chain variable region comprising:
[0818] (i) a CDR-H1 comprising the amino acid sequence of any one of SEQ ID NOs:165, 168, 171 and 174;
[0819] (ii) a CDR-H2 comprising the amino acid sequence of any one of SEQ ID NOs:166, 169, 172, and 175;
[0820] (iii) a CDR-H3 comprising the amino acid sequence of any one of SEQ ID NOs:167, 170, 173 and 176; and

[0821] (b) a light chain variable region comprising:
[0822] (i) a CDR-L1 comprising the amino acid sequence of any one of SEQ ID NOs:181, 184, 187 and 190;
[0823] (ii) a CDR-L2 comprising the amino acid sequence of any one of SEQ ID NOs:182, 185, 188 and 191; and
[0824] (iii) a CDR-L3 comprising the amino acid sequence of any one of SEQ ID NOs:183, 186, 189 and 192.
   299. The CD3 binding molecule of embodiment 298, in which the heavy chain variable region comprises a CDR-H1 comprising the amino acid sequence of SEQ ID NO:165, a CDR-H2 comprising the amino acid sequence of SEQ ID NO:166, and a CDR-H3 comprising the amino acid sequence of SEQ ID NO:167, and in which the light chain variable region comprises a CDR-L1 comprising the amino acid sequence of SEQ ID NO:181, a CDR-L2 comprising the amino acid sequence of SEQ ID NO:182, and a CDR-L3 comprising the amino acid sequence of SEQ ID NO:183.
   300. The CD3 binding molecule of embodiment 298, in which the heavy chain variable region comprises a CDR-H1 comprising the amino acid sequence of SEQ ID NO:168, a CDR-H2 comprising the amino acid sequence of SEQ ID NO:169, and a CDR-H3 comprising the amino acid sequence of SEQ ID NO:170, and in which the light chain variable region comprises a CDR-L1 comprising the amino acid sequence of SEQ ID NO:184, a CDR-L2 comprising the amino acid sequence of SEQ ID NO:185, and a CDR-L3 comprising the amino acid sequence of SEQ ID NO:186.
   301. The CD3 binding molecule of embodiment 298, in which the heavy chain variable region comprises a CDR-H1 comprising the amino acid sequence of SEQ ID NO:171, a CDR-H2 comprising the amino acid sequence of SEQ ID NO:172, and a CDR-H3 comprising the amino acid sequence of SEQ ID NO:173, and in which the light chain variable region comprises a CDR-L1 comprising the amino acid sequence of SEQ ID NO:187, a CDR-L2 comprising the amino acid sequence of SEQ ID NO:188, and a CDR-L3 comprising the amino acid sequence of SEQ ID NO:189.
   302. The CD3 binding molecule of embodiment 298, in which the heavy chain variable region comprises a CDR-H1 comprising the amino acid sequence of SEQ ID NO:174, a CDR-H2 comprising the amino acid sequence of SEQ ID NO:175, and a CDR-H3 comprising the amino acid sequence of SEQ ID NO:176, and in which the light chain variable region comprises a CDR-L1 comprising the amino acid sequence of SEQ ID NO:190, a CDR-L2 comprising the amino acid sequence of SEQ ID NO:191, and a CDR-L3 comprising the amino acid sequence of SEQ ID NO:192.
   303. A CD3 binding molecule that specifically binds to human CD3 and comprises:

[0825] (a) a heavy chain variable region comprising:
[0826] (i) a CDR-H1 comprising the amino acid sequence of any one of SEQ ID NOs:197, 200, 203 and 206;
[0827] (ii) a CDR-H2 comprising the amino acid sequence of any one of SEQ ID NOs:198, 201, 204 and 207;
[0828] (iii) a CDR-H3 comprising the amino acid sequence of any one of SEQ ID NOs:199, 202, 205 and 208; and

[0829] (b) a light chain variable region comprising:
[0830] (i) a CDR-L1 comprising the amino acid sequence of any one of SEQ ID NOs:213, 216, 219 and 222,
[0831] (ii) a CDR-L2 comprising the amino acid sequence of any one of SEQ ID NOs:214, 217, 220 and 223; and
[0832] (iii) a CDR-L3 comprising the amino acid sequence of any one of SEQ ID NOs:215, 218, 221 and 224.
   304. The CD3 binding molecule of embodiment 303, in which the heavy chain variable region comprises a CDR-H1 comprising the amino acid sequence of SEQ ID NO:197, a CDR-H2 comprising the amino acid sequence of SEQ ID NO:198, and a CDR-H3 comprising the amino acid sequence of SEQ ID NO:199, and in which the light chain variable region comprises a CDR-L1 comprising the amino acid sequence of SEQ ID NO:213, a CDR-L2 comprising the amino acid sequence of SEQ ID NO:2214, and a CDR-L3 comprising the amino acid sequence of SEQ ID NO:215.
   305. The CD3 binding molecule of embodiment 303, in which the heavy chain variable region comprises a CDR-H1 comprising the amino acid sequence of SEQ ID NO:200, a CDR-H2 comprising the amino acid sequence of SEQ ID NO:201, and a CDR-H3 comprising the amino acid sequence of SEQ ID NO:202, and in which the light chain variable region comprises a CDR-L1 comprising the amino acid sequence of SEQ ID NO:216, a CDR-L2 comprising the amino acid sequence of SEQ ID NO:217, and a CDR-L3 comprising the amino acid sequence of SEQ ID NO:218.
   306. The CD3 binding molecule of embodiment 303, in which the heavy chain variable region comprises a CDR-H1 comprising the amino acid sequence of SEQ ID NO:203, a CDR-H2 comprising the amino acid sequence of SEQ ID NO:204, and a CDR-H3 comprising the amino acid sequence of SEQ ID NO:205, and in which the light chain variable region comprises a CDR-L1 comprising the amino acid sequence of SEQ ID NO:219, a CDR-L2 comprising the amino acid sequence of SEQ ID NO:220, and a CDR-L3 comprising the amino acid sequence of SEQ ID NO:221.
   307. The CD3 binding molecule of embodiment 303, in which the heavy chain variable region comprises a CDR-H1 comprising the amino acid sequence of SEQ ID NO:206, a CDR-H2 comprising the amino acid sequence of SEQ ID NO:207, and a CDR-H3 comprising the amino acid sequence of SEQ ID NO:208, and in which the light chain variable region comprises a CDR-L1 comprising the amino acid sequence of SEQ ID NO:222, a CDR-L2 comprising the amino acid sequence of SEQ ID NO:223, and a CDR-L3 comprising the amino acid sequence of SEQ ID NO:224.
   308. A CD3 binding molecule that specifically binds to human CD3 and comprises:

[0833] (a) a heavy chain variable region comprising:
[0834] (i) a CDR-H1 comprising the amino acid sequence of any one of SEQ ID NOs:229, 232, 235 and 238;
[0835] (ii) a CDR-H2 comprising the amino acid sequence of any one of SEQ ID NOs:230, 233, 236 and 239, and
[0836] (iii) a CDR-H3 comprising the amino acid sequence of any one of SEQ ID NOs:231, 234, 237 and 240;
[0837] and

[0838] (b) a light chain variable region comprising:
[0839] (i) a CDR-L1 comprising the amino acid sequence of any one of SEQ ID NOs:245, 248, 251 and 254;
[0840] (ii) a CDR-L2 comprising the amino acid sequence of any one of SEQ ID NOs:246, 249, 252 and 255; and
[0841] (iii) a CDR-L3 comprising the amino acid sequence of any one of SEQ ID NOs:247, 250, 253 and 256.
   309. The CD3 binding molecule of embodiment 308, in which the heavy chain variable region comprises a CDR-H1 comprising the amino acid sequence of SEQ ID NO:229, a CDR-H2 comprising the amino acid sequence of SEQ ID NO:230, and a CDR-H3 comprising the amino acid sequence of SEQ ID NO:231, and in which the light chain variable region comprises a CDR-L1 comprising the amino acid sequence of SEQ ID NO:245, a CDR-L2 comprising the amino acid sequence of SEQ ID NO:246, and a CDR-L3 comprising the amino acid sequence of SEQ ID NO:247.
   310. The CD3 binding molecule of embodiment 308, in which the heavy chain variable region comprises a CDR-H1 comprising the amino acid sequence of SEQ ID NO:232, a CDR-H2 comprising the amino acid sequence of SEQ ID NO:233, and a CDR-H3 comprising the amino acid sequence of SEQ ID NO:234, and in which the light chain variable region comprises a CDR-L1 comprising the amino acid sequence of SEQ ID NO:248, a CDR-L2 comprising the amino acid sequence of SEQ ID NO:249, and a CDR-L3 comprising the amino acid sequence of SEQ ID NO:250.
   311. The CD3 binding molecule of embodiment 308, in which the heavy chain variable region comprises a CDR-H1 comprising the amino acid sequence of SEQ ID NO:235, a CDR-H2 comprising the amino acid sequence of SEQ ID NO:236, and a CDR-H3 comprising the amino acid sequence of SEQ ID NO:237, and in which the light chain variable region comprises a CDR-L1 comprising the amino acid sequence of SEQ ID NO:251, a CDR-L2 comprising the amino acid sequence of SEQ ID NO:252, and a CDR-L3 comprising the amino acid sequence of SEQ ID NO:253.
   312. The CD3 binding molecule of embodiment 308, in which the heavy chain variable region comprises a CDR-H1 comprising the amino acid sequence of SEQ ID NO:238, a CDR-H2 comprising the amino acid sequence of SEQ ID NO:239, and a CDR-H3 comprising the amino acid sequence of SEQ ID NO:240, and in which the light chain variable region comprises a CDR-L1 comprising the amino acid sequence of SEQ ID NO:254, a CDR-L2 comprising the amino acid sequence of SEQ ID NO:255, and a CDR-L3 comprising the amino acid sequence of SEQ ID NO:255.
   313. A CD3 binding molecule that specifically binds to human CD3 and comprises:

[0842] (a) a heavy chain variable region comprising:
[0843] (i) a CDR-H1 comprising the amino acid sequence of any one of SEQ ID NOs:261, 264, 267 and 270;
[0844] (ii) a CDR-H2 comprising the amino acid sequence of any one of SEQ ID NOs:262, 265, 268 and 271; and
[0845] (iii) a CDR-H3 comprising the amino acid sequence of any one of SEQ ID NOs:263, 266, 269 and 272;
[0846] and

[0847] (b) a light chain variable region comprising:
[0848] (i) a CDR-L1 comprising the amino acid sequence of any one of SEQ ID NOs:277, 280, 283 and 286;
[0849] (ii) a CDR-L2 comprising the amino acid sequence of any one of SEQ ID NOs:278, 281, 284 and 287; and
[0850] (iii) a CDR-L3 comprising the amino acid sequence of any one of SEQ ID NOs:279, 282, 285 and 288.
   314. The CD3 binding molecule of embodiment 313, in which the heavy chain variable region comprises a CDR-H1 comprising the amino acid sequence of SEQ ID NO:261, a CDR-H2 comprising the amino acid sequence of SEQ ID NO:262, and a CDR-H3 comprising the amino acid sequence of SEQ ID NO:263, and in which the light chain variable region comprises a CDR-L1 comprising the amino acid sequence of SEQ ID NO:277, a CDR-L2 comprising the amino acid sequence of SEQ ID NO:278, and a CDR-L3 comprising the amino acid sequence of SEQ ID NO:279.
   315. The CD3 binding molecule of embodiment 313, in which the heavy chain variable region comprises a CDR-H1 comprising the amino acid sequence of SEQ ID NO:264, a CDR-H2 comprising the amino acid sequence of SEQ ID NO:265, and a CDR-H3 comprising the amino acid sequence of SEQ ID NO:266, and in which the light chain variable region comprises a CDR-L1 comprising the amino acid sequence of SEQ ID NO:280, a CDR-L2 comprising the amino acid sequence of SEQ ID NO:281, and a CDR-L3 comprising the amino acid sequence of SEQ ID NO:282.
   316. The CD3 binding molecule of embodiment 313, in which the heavy chain variable region comprises a CDR-H1 comprising the amino acid sequence of SEQ ID NO:267, a CDR-H2 comprising the amino acid sequence of SEQ ID NO:268, and a CDR-H3 comprising the amino acid sequence of SEQ ID NO:269, and in which the light chain variable region comprises a CDR-L1 comprising the amino acid sequence of SEQ ID NO:283, a CDR-L2 comprising the amino acid sequence of SEQ ID NO:284, and a CDR-L3 comprising the amino acid sequence of SEQ ID NO:285.
   317. The CD3 binding molecule of embodiment 313, in which the heavy chain variable region comprises a CDR-H1 comprising the amino acid sequence of SEQ ID NO:270, a CDR-H2 comprising the amino acid sequence of SEQ ID NO:271, and a CDR-H3 comprising the amino acid sequence of SEQ ID NO:272, and in which the light chain variable region comprises a CDR-L1 comprising the amino acid sequence of SEQ ID NO:286, a CDR-L2 comprising the amino acid sequence of SEQ ID NO:287, and a CDR-L3 comprising the amino acid sequence of SEQ ID NO:288.
   318. A CD3 binding molecule that specifically binds to human CD3 and comprises:

[0851] (a) a heavy chain variable region comprising:
[0852] (i) a CDR-H1 comprising the amino acid sequence of any one of SEQ ID NOs:293, 296, 299 and 302;
[0853] (ii) a CDR-H2 comprising the amino acid sequence of any one of SEQ ID NOs:294, 297, 300 and 303; and
[0854] (iii) a CDR-H3 comprising the amino acid sequence of any one of SEQ ID NOs:295, 298, 301 and 304;
[0855] and

[0856] (b) a light chain variable region comprising:
[0857] (i) a CDR-L1 comprising the amino acid sequence of any one of SEQ ID NOs:309, 312, 315 and 318;
[0858] (ii) a CDR-L2 comprising the amino acid sequence of any one of SEQ ID NOs:310, 313, 316 and 319; and
[0859] (iii) a CDR-L3 comprising the amino acid sequence of any one of SEQ ID NOs:311, 314, 317 and 320.
   319. The CD3 binding molecule of embodiment 318, in which the heavy chain variable region comprises a CDR-H1 comprising the amino acid sequence of SEQ ID NO:293, a CDR-H2 comprising the amino acid sequence of SEQ ID NO:294, and a CDR-H3 comprising the amino acid sequence of SEQ ID NO:295, and in which the light chain variable region comprises a CDR-L1 comprising the amino acid sequence of SEQ ID NO:309, a CDR-L2 comprising the amino acid sequence of SEQ ID NO:310, and a CDR-L3 comprising the amino acid sequence of SEQ ID NO:311.
   320. The CD3 binding molecule of embodiment 318, in which the heavy chain variable region comprises a CDR-H1 comprising the amino acid sequence of SEQ ID NO:296, a CDR-H2 comprising the amino acid sequence of SEQ ID NO:297, and a CDR-H3 comprising the amino acid sequence of SEQ ID NO:298, and in which the light chain variable region comprises a CDR-L1 comprising the amino acid sequence of SEQ ID NO:312, a CDR-L2 comprising the amino acid sequence of SEQ ID NO:313, and a CDR-L3 comprising the amino acid sequence of SEQ ID NO:314.
   321. The CD3 binding molecule of embodiment 318, in which the heavy chain variable region comprises a CDR-H1 comprising the amino acid sequence of SEQ ID NO:299, a CDR-H2 comprising the amino acid sequence of SEQ ID NO:300, and a CDR-H3 comprising the amino acid sequence of SEQ ID NO:301, and in which the light chain variable region comprises a CDR-L1 comprising the amino acid sequence of SEQ ID NO:315, a CDR-L2 comprising the amino acid sequence of SEQ ID NO:316, and a CDR-L3 comprising the amino acid sequence of SEQ ID NO:317.
   322. The CD3 binding molecule of embodiment 318, in which the heavy chain variable region comprises a CDR-H1 comprising the amino acid sequence of SEQ ID NO:302, a CDR-H2 comprising the amino acid sequence of SEQ ID NO:303, and a CDR-H3 comprising the amino acid sequence of SEQ ID NO:304, and in which the light chain variable region comprises a CDR-L1 comprising the amino acid sequence of SEQ ID NO:318, a CDR-L2 comprising the amino acid sequence of SEQ ID NO:319, and a CDR-L3 comprising the amino acid sequence of SEQ ID NO:320.
   323. A CD3 binding molecule that specifically binds to human CD3 and comprises:

[0860] (a) a heavy chain variable region comprising:
[0861] (i) a CDR-H1 comprising the amino acid sequence of any one of SEQ ID NOs:325, 328, 331 and 334;
[0862] (ii) a CDR-H2 comprising the amino acid sequence of any one of SEQ ID NOs:326, 329, 332 and 335; and
[0863] (iii) a CDR-H3 comprising the amino acid sequence of any one of SEQ ID NOs:327, 330, 333 and 336;
[0864] and

[0865] (b) a light chain variable region comprising:
[0866] (i) a CDR-L1 comprising the amino acid sequence of any one of SEQ ID NOs:341, 344, 347 and 350;
[0867] (ii) a CDR-L2 comprising the amino acid sequence of any one of SEQ ID NOs:342, 345, 348 and 351; and
[0868] (iii) a CDR-L3 comprising the amino acid sequence of any one of SEQ ID NOs:343, 346, 349 and 352.
   324. The CD3 binding molecule of embodiment 323, in which the heavy chain variable region comprises a CDR-H1 comprising the amino acid sequence of SEQ ID NO:325, a CDR-H2 comprising the amino acid sequence of SEQ ID NO:326, and a CDR-H3 comprising the amino acid sequence of SEQ ID NO:327, and in which the light chain variable region comprises a CDR-L1 comprising the amino acid sequence of SEQ ID NO:341, a CDR-L2 comprising the amino acid sequence of SEQ ID NO:342, and a CDR-L3 comprising the amino acid sequence of SEQ ID NO:343.
   325. The CD3 binding molecule of embodiment 323, in which the heavy chain variable region comprises a CDR-H1 comprising the amino acid sequence of SEQ ID NO:328, a CDR-H2 comprising the amino acid sequence of SEQ ID NO:329, and a CDR-H3 comprising the amino acid sequence of SEQ ID NO:330, and in which the light chain variable region comprises a CDR-L1 comprising the amino acid sequence of SEQ ID NO:344, a CDR-L2 comprising the amino acid sequence of SEQ ID NO:345, and a CDR-L3 comprising the amino acid sequence of SEQ ID NO:346.
   326. The CD3 binding molecule of embodiment 323, in which the heavy chain variable region comprises a CDR-H1 comprising the amino acid sequence of SEQ ID NO:331, a CDR-H2 comprising the amino acid sequence of SEQ ID NO:332, and a CDR-H3 comprising the amino acid sequence of SEQ ID NO:333, and in which the light chain variable region comprises a CDR-L1 comprising the amino acid sequence of SEQ ID NO:347, a CDR-L2 comprising the amino acid sequence of SEQ ID NO:348, and a CDR-L3 comprising the amino acid sequence of SEQ ID NO:349.
   327. The CD3 binding molecule of embodiment 323, in which the heavy chain variable region comprises a CDR-H1 comprising the amino acid sequence of SEQ ID NO:334, a CDR-H2 comprising the amino acid sequence of SEQ ID NO:335, and a CDR-H3 comprising the amino acid sequence of SEQ ID NO:336, and in which the light chain variable region comprises a CDR-L1 comprising the amino acid sequence of SEQ ID NO:350, a CDR-L2 comprising the amino acid sequence of SEQ ID NO:351, and a CDR-L3 comprising the amino acid sequence of SEQ ID NO:352.
   328. A CD3 binding molecule that specifically binds to human CD3 and comprises:

[0869] (a) a heavy chain variable region comprising:
[0870] (i) a CDR-H1 comprising the amino acid sequence of any one of SEQ ID NOs:357, 360, 363 and 366;
[0871] (ii) a CDR-H2 comprising the amino acid sequence of any one of SEQ ID NOs:358, 361, 364 and 367; and
[0872] (iii) a CDR-H3 comprising the amino acid sequence of any one of SEQ ID NOs:359, 362, 365 and 368;
[0873] and

[0874] (b) a light chain variable region comprising:
[0875] (i) a CDR-L1 comprising the amino acid sequence of any one of SEQ ID NOs:373, 376, 379 and 382;
[0876] (ii) a CDR-L2 comprising the amino acid sequence of any one of SEQ ID NOs:374, 377, 380 and 383; and
[0877] (iii) a CDR-L3 comprising the amino acid sequence of any one of SEQ ID NOs:375, 378, 381 and 384.
   329. The CD3 binding molecule of embodiment 328, in which the heavy chain variable region comprises a CDR-H1 comprising the amino acid sequence of SEQ ID NO:357, a CDR-H2 comprising the amino acid sequence of SEQ ID NO:358, and a CDR-H3 comprising the amino acid sequence of SEQ ID NO:359, and in which the light chain variable region comprises a CDR-L1 comprising the amino acid sequence of SEQ ID NO:373, a CDR-L2 comprising the amino acid sequence of SEQ ID NO:374, and a CDR-L3 comprising the amino acid sequence of SEQ ID NO:375.
   330. The CD3 binding molecule of embodiment 328, in which the heavy chain variable region comprises a CDR-H1 comprising the amino acid sequence of SEQ ID NO:360, a CDR-H2 comprising the amino acid sequence of SEQ ID NO:361, and a CDR-H3 comprising the amino acid sequence of SEQ ID NO:362, and in which the light chain variable region comprises a CDR-L1 comprising the amino acid sequence of SEQ ID NO:376, a CDR-L2 comprising the amino acid sequence of SEQ ID NO:377, and a CDR-L3 comprising the amino acid sequence of SEQ ID NO:378.
   331. The CD3 binding molecule of embodiment 328, in which the heavy chain variable region comprises a CDR-H1 comprising the amino acid sequence of SEQ ID NO:363, a CDR-H2 comprising the amino acid sequence of SEQ ID NO:364, and a CDR-H3 comprising the amino acid sequence of SEQ ID NO:365, and in which the light chain variable region comprises a CDR-L1 comprising the amino acid sequence of SEQ ID NO:379, a CDR-L2 comprising the amino acid sequence of SEQ ID NO:380, and a CDR-L3 comprising the amino acid sequence of SEQ ID NO:381.
   332. The CD3 binding molecule of embodiment 328, in which the heavy chain variable region comprises a CDR-H1 comprising the amino acid sequence of SEQ ID NO:366, a CDR-H2 comprising the amino acid sequence of SEQ ID NO:367, and a CDR-H3 comprising the amino acid sequence of SEQ ID NO:368, and in which the light chain variable region comprises a CDR-L1 comprising the amino acid sequence of SEQ ID NO:382, a CDR-L2 comprising the amino acid sequence of SEQ ID NO:383, and a CDR-L3 comprising the amino acid sequence of SEQ ID NO:384.
   333. A CD3 binding molecule that specifically binds to human CD3 and comprises:

[0878] (a) a heavy chain variable region comprising:
[0879] (i) a CDR-H1 comprising the amino acid sequence of any one of SEQ ID NOs:389, 392, 395 and 398;
[0880] (ii) a CDR-H2 comprising the amino acid sequence of any one of SEQ ID NOs:390, 393, 396 and 399; and
[0881] (iii) a CDR-H3 comprising the amino acid sequence of any one of SEQ ID NOs:391, 394, 397 and 400;
[0882] and

[0883] (b) a light chain variable region comprising:
[0884] (i) a CDR-L1 comprising the amino acid sequence of any one of SEQ ID NOs:405, 408, 411 and 414;
[0885] (ii) a CDR-L2 comprising the amino acid sequence of any one of SEQ ID NOs:406, 409, 412 and 415; and
[0886] (iii) a CDR-L3 comprising the amino acid sequence of any one of SEQ ID NOs:407, 410, 413 and 416.
   334. The CD3 binding molecule of embodiment 333, in which the heavy chain variable region comprises a CDR-H1 comprising the amino acid sequence of SEQ ID NO:389, a CDR-H2 comprising the amino acid sequence of SEQ ID NO:390, and a CDR-H3 comprising the amino acid sequence of SEQ ID NO:391, and in which the light chain variable region comprises a CDR-L1 comprising the amino acid sequence of SEQ ID NO:405, a CDR-L2 comprising the amino acid sequence of SEQ ID NO:406, and a CDR-L3 comprising the amino acid sequence of SEQ ID NO:407.
   335. The CD3 binding molecule of embodiment 333, in which the heavy chain variable region comprises a CDR-H1 comprising the amino acid sequence of SEQ ID NO:392, a CDR-H2 comprising the amino acid sequence of SEQ ID NO:393, and a CDR-H3 comprising the amino acid sequence of SEQ ID NO:394, and in which the light chain variable region comprises a CDR-L1 comprising the amino acid sequence of SEQ ID NO:408, a CDR-L2 comprising the amino acid sequence of SEQ ID NO:409, and a CDR-L3 comprising the amino acid sequence of SEQ ID NO:410.
   336. The CD3 binding molecule of embodiment 333, in which the heavy chain variable region comprises a CDR-H1 comprising the amino acid sequence of SEQ ID NO:395, a CDR-H2 comprising the amino acid sequence of SEQ ID NO:396, and a CDR-H3 comprising the amino acid sequence of SEQ ID NO:397, and in which the light chain variable region comprises a CDR-L1 comprising the amino acid sequence of SEQ ID NO:411, a CDR-L2 comprising the amino acid sequence of SEQ ID NO:412, and a CDR-L3 comprising the amino acid sequence of SEQ ID NO:413.
   337. The CD3 binding molecule of embodiment 333, in which the heavy chain variable region comprises a CDR-H1 comprising the amino acid sequence of SEQ ID NO:398, a CDR-H2 comprising the amino acid sequence of SEQ ID NO:399, and a CDR-H3 comprising the amino acid sequence of SEQ ID NO:400, and in which the light chain variable region comprises a CDR-L1 comprising the amino acid sequence of SEQ ID NO:414, a CDR-L2 comprising the amino acid sequence of SEQ ID NO:415, and a CDR-L3 comprising the amino acid sequence of SEQ ID NO:416.
   338. A CD3 binding molecule that specifically binds to human CD3 and comprises:

[0887] (a) a heavy chain variable region comprising:
[0888] (i) a CDR-H1 comprising the amino acid sequence of any one of SEQ ID NOs:421, 424, 427 and 430;
[0889] (ii) a CDR-H2 comprising the amino acid sequence of any one of SEQ ID NOs:422, 425, 428 and 431; and
[0890] (iii) a CDR-H3 comprising the amino acid sequence of any one of SEQ ID NOs:423, 426, 429 and 432;
[0891] and

[0892] (b) a light chain variable region that comprises:
[0893] (i) a CDR-L1 comprising the amino acid sequence of any one of SEQ ID NOs:437, 440, 443 and 446;
[0894] (ii) a CDR-L2 comprising the amino acid sequence of any one of SEQ ID NOs:438, 441, 444 and 447; and
[0895] (iii) a CDR-L3 comprising the amino acid sequence of any one of SEQ ID NOs:439, 442, 445 and 448.
   339. The CD3 binding molecule of embodiment 338, in which the heavy chain variable region comprises a CDR-H1 comprising the amino acid sequence of SEQ ID NO:421, a CDR-H2 comprising the amino acid sequence of SEQ ID NO:422, and a CDR-H3 comprising the amino acid sequence of SEQ ID NO:423, and in which the light chain variable region comprises a CDR-L1 comprising the amino acid sequence of SEQ ID NO:437, a CDR-L2 comprising the amino acid sequence of SEQ ID NO:438, and a CDR-L3 comprising the amino acid sequence of SEQ ID NO:439.
   340. The CD3 binding molecule of embodiment 338, in which the heavy chain variable region comprises a CDR-H1 comprising the amino acid sequence of SEQ ID NO:424, a CDR-H2 comprising the amino acid sequence of SEQ ID NO:425, and a CDR-H3 comprising the amino acid sequence of SEQ ID NO:426, and in which the light chain variable region comprises a CDR-L1 comprising the amino acid sequence of SEQ ID NO:440, a CDR-L2 comprising the amino acid sequence of SEQ ID NO:441, and a CDR-L3 comprising the amino acid sequence of SEQ ID NO:442.
   341. The CD3 binding molecule of embodiment 338, in which the heavy chain variable region comprises a CDR-H1 comprising the amino acid sequence of SEQ ID NO:427, a CDR-H2 comprising the amino acid sequence of SEQ ID NO:428, and a CDR-H3 comprising the amino acid sequence of SEQ ID NO:429, and in which the light chain variable region comprises a CDR-L1 comprising the amino acid sequence of SEQ ID NO:443, a CDR-L2 comprising the amino acid sequence of SEQ ID NO:444, and a CDR-L3 comprising the amino acid sequence of SEQ ID NO:445.
   342. The CD3 binding molecule of embodiment 338, in which the heavy chain variable region comprises a CDR-H1 comprising the amino acid sequence of SEQ ID NO:430, a CDR-H2 comprising the amino acid sequence of SEQ ID NO:431, and a CDR-H3 comprising the amino acid sequence of SEQ ID NO:432, and in which the light chain variable region comprises a CDR-L1 comprising the amino acid sequence of SEQ ID NO:446, a CDR-L2 comprising the amino acid sequence of SEQ ID NO:447, and a CDR-L3 comprising the amino acid sequence of SEQ ID NO:448.
   343. The CD3 binding molecule of embodiment 181, which comprises a heavy chain variable sequence set forth in Table 1J-1 and the corresponding light chain variable sequence set forth in Table 1J-2.
   344. The CD3 binding molecule of embodiment 343, wherein the heavy chain variable sequence and the corresponding light chain variable sequence are those of NOV292.
   345. The CD3 binding molecule of embodiment 343, wherein the heavy chain variable sequence and the corresponding light chain variable sequence are those of NOV123.
   346. The CD3 binding molecule of embodiment 343, wherein the heavy chain variable sequence and the corresponding light chain variable sequence are those of Sp10b.
   347. The CD3 binding molecule of embodiment 343, wherein the heavy chain variable sequence and the corresponding light chain variable sequence are those of NOV453.
   348. The CD3 binding molecule of embodiment 343, wherein the heavy chain variable sequence and the corresponding light chain variable sequence are those of NOV229.
   349. The CD3 binding molecule of embodiment 343, wherein the heavy chain variable sequence and the corresponding light chain variable sequence are those of NOV110.
   350. The CD3 binding molecule of embodiment 343, wherein the heavy chain variable sequence and the corresponding light chain variable sequence are those of NOV832.
   351. The CD3 binding molecule of embodiment 343, wherein the heavy chain variable sequence and the corresponding light chain variable sequence are those of NOV589.
   352. The CD3 binding molecule of embodiment 343, wherein the heavy chain variable sequence and the corresponding light chain variable sequence are those of NOV580.
   353. The CD3 binding molecule of embodiment 343, wherein the heavy chain variable sequence and the corresponding light chain variable sequence are those of NOV567.
   354. The CD3 binding molecule of embodiment 343, wherein the heavy chain variable sequence and the corresponding light chain variable sequence are those of NOV221.
   355. The CD3 binding molecule of embodiment 343, wherein the heavy chain variable sequence and the corresponding light chain variable sequence are those of CD3_sp11a_bkm1.
   356. The CD3 binding molecule of embodiment 343, wherein the heavy chain variable sequence and the corresponding light chain variable sequence are those of CD3_SP11a_bkm2.
   357. The CD3 binding molecule of embodiment 343, wherein the heavy chain variable sequence and the corresponding light chain variable sequence are those of CD3_sp11a_hz0.
   358. The CD3 binding molecule of embodiment 343, wherein the heavy chain variable sequence and the corresponding light chain variable sequence are those of CD3_SP11A_HZ1.
   359. The CD3 binding molecule of embodiment 343, wherein the heavy chain variable sequence and the corresponding light chain variable sequence are those of CD3_sp11a_sansPTM_hz1.
   360. The CD3 binding molecule of embodiment 343, wherein the heavy chain variable sequence and the corresponding light chain variable sequence are those of CD3_sp11a_sansPTM_rat.
   361. The CD3 binding molecule of embodiment 343, wherein the heavy chain variable sequence and the corresponding light chain variable sequence are those of CD3_sp11a_VHVL_YY.
   362. The CD3 binding molecule of embodiment 343, wherein the heavy chain variable sequence and the corresponding light chain variable sequence are those of CD3_SP11A_VHVL_SS.
   363. The CD3 binding molecule of embodiment 343, wherein the heavy chain variable sequence and the corresponding light chain variable sequence are those of CD3_SP11A_VHVL_WS.
   364. The CD3 binding molecule of embodiment 343, wherein the heavy chain variable sequence and the corresponding light chain variable sequence are those of CD3_sp11a_VHVL_SW.
   365. The CD3 binding molecule of embodiment 343, wherein the heavy chain variable sequence and the corresponding light chain variable sequence are those of CD3_SP11A_VHVL_TT.
   366. The CD3 binding molecule of embodiment 343, wherein the heavy chain variable sequence and the corresponding light chain variable sequence are those of CD3_SP11A_VHVL_TW.
   367. The CD3 binding molecule of embodiment 343, wherein the heavy chain variable sequence and the corresponding light chain variable sequence are those of CD3_SP11A_VHVL_WT.
   368. The CD3 binding molecule of embodiment 343, wherein the heavy chain variable sequence and the corresponding light chain variable sequence are those of CD3_SP11A VH3_VLK_3.
   369. The CD3 binding molecule of embodiment 343, wherein the heavy chain variable sequence and the corresponding light chain variable sequence are those of CD3_sp11a_VH1_VK2.
   370. The CD3 binding molecule of embodiment 343, wherein the heavy chain variable sequence and the corresponding light chain variable sequence are those of CD3_SP11A_VH3_VLK1.
   371. The CD3 binding molecule of embodiment 343, wherein the heavy chain variable sequence and the corresponding light chain variable sequence are those of CD3_SP11A_VH5_VK2.
   372. The CD3 binding molecule of embodiment 343, wherein the heavy chain variable sequence and the corresponding light chain variable sequence are those of CD3_sp9aFW1_VL_VH_S56G.
   373. The CD3 binding molecule of embodiment 343, wherein the heavy chain variable sequence and the corresponding light chain variable sequence are those of CD3_SP9AFW4_VL_VH_S56G.
   374. The CD3 binding molecule of embodiment 343, wherein the heavy chain variable sequence and the corresponding light chain variable sequence are those of CD3_sp9aFW1_VL_VH.
   375. The CD3 binding molecule of embodiment 343, wherein the heavy chain variable sequence and the corresponding light chain variable sequence are those of CD3_sp9aFW4_VLVH.
   376. The CD3 binding molecule of embodiment 343, wherein the heavy chain variable sequence and the corresponding light chain variable sequence are those of CD3_sp9arabtor_VHVL.
   377. The CD3 binding molecule of embodiment 343, wherein the heavy chain variable sequence and the corresponding light chain variable sequence are those of CD3_sp9arabtor_VLVH.
   378. The CD3 binding molecule of embodiment 343, wherein the heavy chain variable sequence and the corresponding light chain variable sequence are those of CD3_sp11a_VHVL_YY_SANSPTM.
   379. The CD3 binding molecule of embodiment 343, wherein the heavy chain variable sequence and the corresponding light chain variable sequence are those of CD3_sp11a_VHVL_YY_SANSPTM_Y.
   380. The CD3 binding molecule of embodiment 343, wherein the heavy chain variable sequence and the corresponding light chain variable sequence are those of CD3_sp11a_VHVL_YY_SANSPTM_S.
   381. The CD3 binding molecule of embodiment 343, wherein the heavy chain variable sequence and the corresponding light chain variable sequence are those of CD3_sp11a_VHVL_YY_Y.
   382. The CD3 binding molecule of embodiment 343, wherein the heavy chain variable sequence and the corresponding light chain variable sequence are those of CD3_sp11a_VHVL_YY_s.
   383. The CD3 binding molecule of embodiment 343, wherein the heavy chain variable sequence and the corresponding light chain variable sequence are those of CD3_sp11a_VHVL_SS_SANSPTM.
   384. The CD3 binding molecule of embodiment 343, wherein the heavy chain variable sequence and the corresponding light chain variable sequence are those of CD3_sp11a_VHVL_SS_SANSPTM_Y.
   385. The CD3 binding molecule of embodiment 343, wherein the heavy chain variable sequence and the corresponding light chain variable sequence are those of CD3_sp11a_VHVL_SS_SANSPTM_S.
   386. The CD3 binding molecule of embodiment 343, wherein the heavy chain variable sequence and the corresponding light chain variable sequence are those of CD3_sp11a_VHVL_SS_Y.
   387. The CD3 binding molecule of embodiment 343, wherein the heavy chain variable sequence and the corresponding light chain variable sequence are those of CD3_sp11a_VHVL_SS_S.
   388. The CD3 binding molecule of embodiment 343, wherein the heavy chain variable sequence and the corresponding light chain variable sequence are those of CD3_sp11a_VHVL_SS_SANSPTM.
   389. The CD3 binding molecule of embodiment 343, wherein the heavy chain variable sequence and the corresponding light chain variable sequence are those of CD3_sp11a_VHVL_WS_SANSPTM_Y.
   390. The CD3 binding molecule of embodiment 343, wherein the heavy chain variable sequence and the corresponding light chain variable sequence are those of CD3_sp11a_VHVL_S_SANSPTM_S.
   391. The CD3 binding molecule of embodiment 343, wherein the heavy chain variable sequence and the corresponding light chain variable sequence are those of CD3_sp11a_VHVL_WS_Y.
   392. The CD3 binding molecule of embodiment 343, wherein the heavy chain variable sequence and the corresponding light chain variable sequence are those of CD3_sp11a_VHVL_WS_S.
   393. The CD3 binding molecule of embodiment 343, wherein the heavy chain variable sequence and the corresponding light chain variable sequence are those of CD3_sp11a_VHVL_WS_SANSPTM.
   394. The CD3 binding molecule of embodiment 343, wherein the heavy chain variable sequence and the corresponding light chain variable sequence are those of CD3_sp11a_VHVL_SW_SANSPTM_Y.
   395. The CD3 binding molecule of embodiment 343, wherein the heavy chain variable sequence and the corresponding light chain variable sequence are those of CD3_sp11a_VHVL_SW_SANSPTM_S.
   396. The CD3 binding molecule of embodiment 343, wherein the heavy chain variable sequence and the corresponding light chain variable sequence are those of CD3_sp11a_VHVL_SW_Y.
   397. The CD3 binding molecule of embodiment 343, wherein the heavy chain variable sequence and the corresponding light chain variable sequence are those of CD3_sp11a_VHVL_SW_S.
   398. The CD3 binding molecule of embodiment 343, wherein the heavy chain variable sequence and the corresponding light chain variable sequence are those of CD3_sp11a_VHVL_SW_SANSPTM.
   399. The CD3 binding molecule of embodiment 343, wherein the heavy chain variable sequence and the corresponding light chain variable sequence are those of CD3_sp11a_VHVL_TW_SANSPTM_Y.
   400. The CD3 binding molecule of embodiment 343, wherein the heavy chain variable sequence and the corresponding light chain variable sequence are those of CD3_sp11a_VHVL_TW_SANSPTM_S.
   401. The CD3 binding molecule of embodiment 343, wherein the heavy chain variable sequence and the corresponding light chain variable sequence are those of CD3_sp11a_VHVL_TW_Y.
   402. The CD3 binding molecule of embodiment 343, wherein the heavy chain variable sequence and the corresponding light chain variable sequence are those of CD3_sp11a_VHVL_TW_S.
   403. The CD3 binding molecule of embodiment 343, wherein the heavy chain variable sequence and the corresponding light chain variable sequence are those of CD3_sp11a_VHVL_TW_SANSPTM.
   404. The CD3 binding molecule of embodiment 343, wherein the heavy chain variable sequence and the corresponding light chain variable sequence are those of CD3_sp11a_VHVL_TT_SANSPTM_Y.
   405. The CD3 binding molecule of embodiment 343, wherein the heavy chain variable sequence and the corresponding light chain variable sequence are those of CD3_sp11a_VHVL_TT_SANSPTM_S.
   406. The CD3 binding molecule of embodiment 343, wherein the heavy chain variable sequence and the corresponding light chain variable sequence are those of CD3_sp11a_VHVL_TT_Y.
   407. The CD3 binding molecule of embodiment 343, wherein the heavy chain variable sequence and the corresponding light chain variable sequence are those of CD3_sp11a_VHVL_TT_S.
   408. The CD3 binding molecule of embodiment 343, wherein the heavy chain variable sequence and the corresponding light chain variable sequence are those of CD3_sp11a_VHVL_TT_SANSPTM.
   409. The CD3 binding molecule of embodiment 343, wherein the heavy chain variable sequence and the corresponding light chain variable sequence are those of CD3_SP11AVH3_VLK_3_Y.
   410. The CD3 binding molecule of embodiment 343, wherein the heavy chain variable sequence and the corresponding light chain variable sequence are those of CD3_SP11AVH3_VLK_3_S.
   411. The CD3 binding molecule of embodiment 343, wherein the heavy chain variable sequence and the corresponding light chain variable sequence are those of CD3_SP11AVH3_VLK_3_Y_PTM.
   412. The CD3 binding molecule of embodiment 343, wherein the heavy chain variable sequence and the corresponding light chain variable sequence are those of CD3_SP11AVH3_VLK_3_S_PTM.
   413. The CD3 binding molecule of embodiment 343, wherein the heavy chain variable sequence and the corresponding light chain variable sequence are those of CD3_SP11AVH3_VLK_3_Y_SW.
   414. The CD3 binding molecule of embodiment 343, wherein the heavy chain variable sequence and the corresponding light chain variable sequence are those of CD3_SP11AVH3_VLK_3_S_SW.
   415. The CD3 binding molecule of embodiment 343, wherein the heavy chain variable sequence and the corresponding light chain variable sequence are those of CD3_SP11AVH3_VLK_3_Y_PTM_SW.
   416. The CD3 binding molecule of embodiment 343, wherein the heavy chain variable sequence and the corresponding light chain variable sequence are those of CD3_SP11AVH3_VLK_3_S_SWPTM.
   417. The CD3 binding molecule of embodiment 343, wherein the heavy chain variable sequence and the corresponding light chain variable sequence are those of CD3_SP11AVH3_VLK_SWPTM.
   418. The CD3 binding molecule of embodiment 343, wherein the heavy chain variable sequence and the corresponding light chain variable sequence are those of CD3_SP11AVH3_VLK_3_SW.
   419. The CD3 binding molecule of embodiment 343, wherein the heavy chain variable sequence and the corresponding light chain variable sequence are those of CD3_sp11a_VH1_VK2_Y.
   420. The CD3 binding molecule of embodiment 343, wherein the heavy chain variable sequence and the corresponding light chain variable sequence are those of CD3_sp11a_VH1_VK2_S.
   421. The CD3 binding molecule of embodiment 343, wherein the heavy chain variable sequence and the corresponding light chain variable sequence are those of CD3_sp11a_VH1_VK2_Y_PTM.
   422. The CD3 binding molecule of embodiment 343, wherein the heavy chain variable sequence and the corresponding light chain variable sequence are those of CD3_sp11a_VH1_VK2_S_PTM.
   423. The CD3 binding molecule of embodiment 343, wherein the heavy chain variable sequence and the corresponding light chain variable sequence are those of CD3_sp11a_VH1_VK2_Y_SW.
   424. The CD3 binding molecule of embodiment 343, wherein the heavy chain variable sequence and the corresponding light chain variable sequence are those of CD3_sp11a_VH1_VK2_S_SW.
   425. The CD3 binding molecule of embodiment 343, wherein the heavy chain variable sequence and the corresponding light chain variable sequence are those of CD3_sp11a_VH1_VK2_Y_PTM.
   426. The CD3 binding molecule of embodiment 343, wherein the heavy chain variable sequence and the corresponding light chain variable sequence are those of CD3_sp11a_VH1_VK2_S_PTM_SW.
   427. The CD3 binding molecule of embodiment 343, wherein the heavy chain variable sequence and the corresponding light chain variable sequence are those of CD3_sp11a_VH1_VK2_SW.
   428. The CD3 binding molecule of embodiment 343, wherein the heavy chain variable sequence and the corresponding light chain variable sequence are those of CD3_sp11a_VH1_VK2_SW PTM.
   429. The CD3 binding molecule of embodiment 343, wherein the heavy chain variable sequence and the corresponding light chain variable sequence are those of CD3_SP11A_VH3_VLK1_Y.
   430. The CD3 binding molecule of embodiment 343, wherein the heavy chain variable sequence and the corresponding light chain variable sequence are those of CD3_SP11A_VH3_VLK1_S.
   431. The CD3 binding molecule of embodiment 343, wherein the heavy chain variable sequence and the corresponding light chain variable sequence are those of CD3_SP11A_VH3_VLK1_Y_PTM.
   432. The CD3 binding molecule of embodiment 343, wherein the heavy chain variable sequence and the corresponding light chain variable sequence are those of CD3_SP11A_VH3_VLK1_S_PTM.
   433. The CD3 binding molecule of embodiment 343, wherein the heavy chain variable sequence and the corresponding light chain variable sequence are those of CD3_SP11A_VH3_VLK1_Y_SW.
   434. The CD3 binding molecule of embodiment 343, wherein the heavy chain variable sequence and the corresponding light chain variable sequence are those of CD3_SP11A_VH3_VLK1_S_W.
   435. The CD3 binding molecule of embodiment 343, wherein the heavy chain variable sequence and the corresponding light chain variable sequence are those of CD3_SP11A_VH3_VLK1_Y_PTM.
   436. The CD3 binding molecule of embodiment 343, wherein the heavy chain variable sequence and the corresponding light chain variable sequence are those of CD3_SP11A_VH3_VLK1_S_PTM_SW.
   437. The CD3 binding molecule of embodiment 343, wherein the heavy chain variable sequence and the corresponding light chain variable sequence are those of CD3_SP11A_VH3_VLK1_PTM_SW.
   438. The CD3 binding molecule of embodiment 343, wherein the heavy chain variable sequence and the corresponding light chain variable sequence are those of CD3_SP11A_VH3_VLK1_SW.
   439. The CD3 binding molecule of embodiment 343, wherein the heavy chain variable sequence and the corresponding light chain variable sequence are those of CD3_SP11A_VH5_VK2_Y.
   440. The CD3 binding molecule of embodiment 343, wherein the heavy chain variable sequence and the corresponding light chain variable sequence are those of CD3_SP11A_VH5_VK2_S.
   441. The CD3 binding molecule of embodiment 343, wherein the heavy chain variable sequence and the corresponding light chain variable sequence are those of CD3_SP11A_VH5_VK2_Y_PTM.
   442. The CD3 binding molecule of embodiment 343, wherein the heavy chain variable sequence and the corresponding light chain variable sequence are those of CD3_SP11A_VH5_VK2_S_PTM.
   443. The CD3 binding molecule of embodiment 343, wherein the heavy chain variable sequence and the corresponding light chain variable sequence are those of CD3_SP11A_VH5_VK2_Y_SW.
   444. The CD3 binding molecule of embodiment 343, wherein the heavy chain variable sequence and the corresponding light chain variable sequence are those of CD3_SP11A_VH5_VK2_S_SW.
   445. The CD3 binding molecule of embodiment 343, wherein the heavy chain variable sequence and the corresponding light chain variable sequence are those of CD3_SP11A_VH5_VK2_Y_PTM_SW.
   446. The CD3 binding molecule of embodiment 343, wherein the heavy chain variable sequence and the corresponding light chain variable sequence are those of CD3_SP11A_VH5_VK2_S_PTM_SW.
   447. The CD3 binding molecule of embodiment 343, wherein the heavy chain variable sequence and the corresponding light chain variable sequence are those of CD3_SP11A_VH5_VK2_PTM_SW.
   448. The CD3 binding molecule of embodiment 343, wherein the heavy chain variable sequence and the corresponding light chain variable sequence are those of CD3_SP11A_VH5_VK2_SW.
   449. The CD3 binding molecule of any one of embodiments 1 to 448, which comprises an antibody, an antibody fragment, an scFv, a dsFv, a Fv, a Fab, an scFab, a (Fab′)2, or a single domain antibody (SDAB).
   450. The CD3 binding molecule of embodiment 449, which comprises an antibody or an antibody fragment.
   451. The CD3 binding molecule of embodiment 449, which comprises a scFv.
   452. The CD3 binding molecule of embodiment 451, wherein the scFv comprises a linker connecting the VH and VL domains.
   453. The CD3 binding molecule of embodiment 452, wherein the linker is 5 to 25 amino acids in length.
   454. The CD3 binding molecule of embodiment 452, wherein the linker is 12 to 20 amino acids in length.
   455. The CD3 binding molecule of embodiment 452, wherein the linker is wherein the linker is selected from any one of linkers L1 through L54.
   456. The CD3 binding molecule of embodiment 452, wherein the linker is linker L24.
   457. The CD3 binding molecule of any one of embodiments 1 to 456, which is a multispecific binding molecule.
   458. The CD3 binding molecule of embodiment 457, which is a bispecific binding molecule (BBM).
   459. The CD3 binding molecule of embodiment 458, wherein the BBM comprises:

[0896] (a) an antigen binding module 1 (ABM1) that binds specifically to CD3; and comprises heavy and light chain variable regions of the CD3 binding molecule of any one of embodiments 1 to 448; and

[0897] (b) an antigen binding module 2 (ABM2) that binds specifically to a tumor-associated antigen (“TAA”).

460. The CD3 binding molecule of embodiment 459, wherein ABM1 is an antibody, an antibody fragment, an scFv, a dsFv, a Fv, a Fab, an scFab, a (Fab′)2, a single domain antibody (SDAB), a VH or VL domain, or a camelid VHH domain.
461. The CD3 binding molecule of embodiment 460, wherein ABM1 is an scFv.
462. The CD3 binding molecule of embodiment 461, wherein the scFv comprises a linker connecting the VH and VL domains.
463. The CD3 binding molecule of embodiment 462, wherein the linker is 5 to 25 amino acids in length.
464. The CD3 binding molecule of embodiment 462, wherein the linker is 12 to 20 amino acids in length.
465. The CD3 binding molecule of embodiment 462, wherein the linker is wherein the linker is selected from any one of linkers L1 through L54.
466. The CD3 binding molecule of embodiment 462, wherein the linker is linker L24.
467. The CD3 binding molecule of embodiment 460, wherein ABM1 is a Fab.
468. The CD3 binding molecule of embodiment 467, wherein ABM1 is a Fab heterodimer.
469. The CD3 binding molecule of embodiment 460, wherein ABM1 is an antibody or an antigen-binding domain thereof.
470. The CD3 binding molecule of any one of embodiments 459 to 469, wherein ABM2 is an antibody, an antibody fragment, an scFv, a dsFv, a Fv, a Fab, an scFab, a (Fab′)2, a single domain antibody (SDAB), a VH or VL domain, or a camelid VHH domain.
471. The CD3 binding molecule of embodiment 470, wherein ABM2 is an scFv.
472. The CD3 binding molecule of embodiment 470, wherein ABM2 is a Fab.
473. The CD3 binding molecule of embodiment 472, wherein ABM2 is a Fab heterodimer.
474. The CD3 binding molecule of embodiment 470, wherein ABM2 is an antibody or an antigen-binding domain thereof.
475. The CD2 binding molecule of any one of embodiments 459 to 474, in which ABM1 is capable of binding CD3 at the same time ABM2 is bound to its target molecule.
476. The CD3 binding molecule of any one of embodiments 458 to 475, which is bivalent.
477. The CD3 binding molecule of embodiment 476, which has any one of the configurations depicted in FIGS. 1B-1F.
478. The CD3 binding molecule of embodiment 477, which has the configuration depicted in FIG. 1B.
479. The CD3 binding molecule of embodiment 477, which has the configuration depicted in FIG. 10.
480. The CD3 binding molecule of embodiment 477, which has the configuration depicted in FIG. 1D.
481. The CD3 binding molecule of embodiment 477, which has the configuration depicted in FIG. 1E.
482. The CD3 binding molecule of embodiment 477, which has the configuration depicted in FIG. 1F.
483. The CD3 binding molecule of any one of embodiments 477 to 482, which has the configuration referred to as B1 in Section 7.5.1.
484. The CD3 binding molecule of any one of embodiments 477 to 482, which has the configuration referred to as B2 in Section 7.5.1.
485. The CD3 binding molecule of any one of embodiments 458 to 475, which is trivalent.
486. The CD3 binding molecule of embodiment 485, which has any one of the configurations depicted in FIGS. 1G-1Z.
487. The CD3 binding molecule of embodiment 486, which has the configuration depicted in FIG. 1G.
488. The CD3 binding molecule of embodiment 486, which has the configuration depicted in FIG. 1H.
489. The CD3 binding molecule of embodiment 486, which has the configuration depicted in FIG. 11.
490. The CD3 binding molecule of embodiment 486, which has the configuration depicted in FIG. 1J.
491. The CD3 binding molecule of embodiment 486, which has the configuration depicted in FIG. 1K.
492. The CD3 binding molecule of embodiment 486, which has the configuration depicted in FIG. 1L.
493. The CD3 binding molecule of embodiment 486, which has the configuration depicted in FIG. 1M.
494. The CD3 binding molecule of embodiment 486, which has the configuration depicted in FIG. 1N.
495. The CD3 binding molecule of embodiment 486, which has the configuration depicted in FIG. 10.
496. The CD3 binding molecule of embodiment 486, which has the configuration depicted in FIG. 1P.
497. The CD3 binding molecule of embodiment 486, which has the configuration depicted in FIG. 1Q.
498. The CD3 binding molecule of embodiment 486, which has the configuration depicted in FIG. 1R.
499. The CD3 binding molecule of embodiment 486, which has the configuration depicted in FIG. 1S.
500. The CD3 binding molecule of embodiment 486, which has the configuration depicted in FIG. 1T.
501. The CD3 binding molecule of embodiment 486, which has the configuration depicted in FIG. 1U.
502. The CD3 binding molecule of embodiment 486, which has the configuration depicted in FIG. 1V.
503. The CD3 binding molecule of embodiment 486, which has the configuration depicted in FIG. 1W.
504. The CD3 binding molecule of embodiment 486, which has the configuration depicted in FIG. 1X.
505. The CD3 binding molecule of embodiment 486, which has the configuration depicted in FIG. 1Y.
506. The CD3 binding molecule of embodiment 486, which has the configuration depicted in FIG. 1Z.
507. The CD3 binding molecule of any one of embodiments 486 to 506, which has the configuration referred to as T1 in Section 7.5.2.
508. The CD3 binding molecule of any one of embodiments 486 to 506, which has the configuration referred to as T2 in Section 7.5.2.
509. The CD3 binding molecule of any one of embodiments 486 to 506, which has the configuration referred to as T3 in Section 7.5.2.
510. The CD3 binding molecule of any one of embodiments 486 to 506, which has the configuration referred to as T4 in Section 7.5.2.
511. The CD3 binding molecule of any one of embodiments 486 to 506, which has the configuration referred to as T5 in Section 7.5.2.
512. The CD3 binding molecule of any one of embodiments 486 to 506, which has the configuration referred to as T6 in Section 7.5.2.
513. The CD3 binding molecule of any one of embodiments 458 to 475, which is tetravalent.
514. The CD3 binding molecule of embodiment 513, which has any one of the configurations depicted in FIGS. 1AA-1AH.
515. The CD3 binding molecule of embodiment 514, wherein the CD3 binding which has the configuration depicted in FIG. 1AA.
516. The CD3 binding molecule of embodiment 514, which has the configuration depicted in FIG. 1AB.
517. The CD3 binding molecule of embodiment 514, which has the configuration depicted in FIG. 1AC.
518. The CD3 binding molecule of embodiment 514, which has the configuration depicted in FIG. 1AD.
519. The CD3 binding molecule of embodiment 514, which has the configuration depicted in FIG. 1AE.
520. The CD3 binding molecule of embodiment 514, which has the configuration depicted in FIG. 1AF.
521. The CD3 binding molecule of embodiment 514, which has the configuration depicted in FIG. 1AG.
522. The CD3 binding molecule of embodiment 514, which has the configuration depicted in FIG. 1AH.
523. The CD3 binding molecule of any one of embodiments 514 to 522, which has the configuration referred to as Tv1 in Section 7.5.3.
524. The CD3 binding molecule of any one of embodiments 514 to 522, which has the configuration referred to as Tv2 in Section 7.5.3.
525. The CD3 binding molecule of any one of embodiments 514 to 522, which has the configuration referred to as Tv3 in Section 7.5.3.
526. The CD3 binding molecule of any one of embodiments 514 to 522, which has the configuration referred to as Tv4 in Section 7.5.3.
527. The CD3 binding molecule of any one of embodiments 514 to 522, which has the configuration referred to as Tv5 in Section 7.5.3.
528. The CD3 binding molecule of any one of embodiments 514 to 522, which has the configuration referred to as Tv6 in Section 7.5.3.
529. The CD3 binding molecule of any one of embodiments 514 to 522, which has the configuration referred to as Tv7 in Section 7.5.3.
530. The CD3 binding molecule of any one of embodiments 514 to 522, which has the configuration referred to as Tv8 in Section 7.5.3.
531. The CD3 binding molecule of any one of embodiments 514 to 522, which has the configuration referred to as Tv9 in Section 7.5.3.
532. The CD3 binding molecule of any one of embodiments 514 to 522, which has the configuration referred to as Tv10 in Section 7.5.3.
533. The CD3 binding molecule of any one of embodiments 514 to 522, which has the configuration referred to as Tv11 in Section 7.5.3.
534. The CD3 binding molecule of any one of embodiments 514 to 522, which has the configuration referred to as Tv12 in Section 7.5.3.
535. The CD3 binding molecule of any one of embodiments 514 to 522, which has the configuration referred to as Tv13 in Section 7.5.3.
536. The CD3 binding molecule of any one of embodiments 514 to 522, which has the configuration referred to as Tv14 in Section 7.5.3.
537. The CD3 binding molecule of embodiment 457, which is a trispecific binding molecule (TBM).
538. The CD3 binding molecule of embodiment 537, wherein the TBM comprises:

[0898] (a) an antigen binding module 1 (ABM1) that binds specifically to CD3 and comprises heavy and light chain variable regions of the CD3 binding molecule of any one of embodiments 1 to 448; and

[0899] (b) an antigen binding module 2 (ABM2) that binds specifically to a tumor-associated antigen; and

[0900] (c) an antigen binding module 3 (ABM3) that binds specifically to:
[0901] (i) a tumor-associated antigen other than the tumor-associated antigen bound by ABM2; or
[0902] (ii) CD2.
   539. The CD3 binding molecule of embodiment 538, wherein ABM1 is an antibody, an antibody fragment, an scFv, a dsFv, a Fv, a Fab, an scFab, a (Fab′)2, a single domain antibody (SDAB), a VH or VL domain, or a camelid VHH domain.
   540. The CD3 binding molecule of embodiment 539, wherein ABM1 is an scFv.
   541. The CD3 binding molecule of embodiment 540, wherein the scFv comprises a linker connecting the VH and VL domains.
   542. The CD3 binding molecule of embodiment 541, wherein the linker is 5 to 25 amino acids in length.
   543. The CD3 binding molecule of embodiment 541, wherein the linker is 12 to 20 amino acids in length.
   544. The CD3 binding molecule of embodiment 541, wherein the linker is wherein the linker is selected from any one of linkers L1 through L54.
   545. The CD3 binding molecule of embodiment 541, wherein the linker is linker L24.
   546. The CD3 binding molecule of embodiment 539, wherein ABM1 is a Fab.
   547. The CD3 binding molecule of embodiment 546, wherein ABM1 is a Fab heterodimer.
   548. The CD3 binding molecule of embodiment 539, wherein ABM1 is an antibody or an antigen-binding domain thereof.
   549. The CD3 binding molecule of any one of embodiments 538 to 548, wherein ABM2 is an antibody, an antibody fragment, an scFv, a dsFv, a Fv, a Fab, an scFab, a (Fab′)2, a single domain antibody (SDAB), a VH or VL domain, or a camelid VHH domain.
   550. The CD3 binding molecule of embodiment 549, wherein ABM2 is an scFv.
   551. The CD3 binding molecule of embodiment 549, wherein ABM2 is a Fab.
   552. The CD3 binding molecule of embodiment 551, wherein ABM2 is a Fab heterodimer.
   553. The CD3 binding molecule of embodiment 549, wherein ABM2 is an anti-tumor associated antibody or an antigen-binding domain thereof.
   554. The CD3 binding molecule of any one of embodiments 537 to 553, which is trivalent. 555. The CD3 binding molecule of embodiment 554, which has any one of the configurations depicted in FIGS. 2B-2P.
   556. The CD3 binding molecule of embodiment 555, which has the configuration depicted in FIG. 2B.
   557. The CD3 binding molecule of embodiment 555, which has the configuration depicted in FIG. 2C.
   558. The CD3 binding molecule of embodiment 555, which has the configuration depicted in FIG. 2D.
   559. The CD3 binding molecule of embodiment 555, which has the configuration depicted in FIG. 2E.
   560. The CD3 binding molecule of embodiment 555, which has the configuration depicted in FIG. 2F.
   561. The CD3 binding molecule of embodiment 555, which has the configuration depicted in FIG. 2G.
   562. The CD3 binding molecule of embodiment 555, which has the configuration depicted in FIG. 2H.
   563. The CD3 binding molecule of embodiment 555, which has the configuration depicted in FIG. 2I.
   564. The CD3 binding molecule of embodiment 555, which has the configuration depicted in FIG. 2J.
   565. The CD3 binding molecule of embodiment 555, which has the configuration depicted in FIG. 2K.
   566. The CD3 binding molecule of embodiment 555, which has the configuration depicted in FIG. 2L.
   567. The CD3 binding molecule of embodiment 555, which has the configuration depicted in FIG. 2M.
   568. The CD3 binding molecule of embodiment 555, which has the configuration depicted in FIG. 2N.
   569. The CD3 binding molecule of embodiment 555, which has the configuration depicted in FIG. 2O.
   570. The CD3 binding molecule of embodiment 555, which has the configuration depicted in FIG. 2P.
   571. The CD3 binding molecule of any one of embodiments 554 to 570, which has the configuration referred to as T1 in Section 7.6.1.
   572. CD3 binding molecule of any one of embodiments 554 to 570, which has the configuration referred to as T2 in Section 7.6.1.
   573. CD3 binding molecule of any one of embodiments 554 to 570, which has the configuration referred to as T3 in Section 7.6.1.
   574. CD3 binding molecule of any one of embodiments 554 to 570, which has the configuration referred to as T4 in Section 7.6.1.
   575. CD3 binding molecule of any one of embodiments 554 to 570, which has the configuration referred to as T5 in Section 7.6.1.
   576. CD3 binding molecule of any one of embodiments 554 to 570, which has the configuration referred to as T6 in Section 7.6.1.
   577. The CD3 binding molecule of any one of embodiments 537 to 553, which is tetravalent.
   578. The CD3 binding molecule of embodiment 577, which has any one of the configurations depicted in FIGS. 2Q-2S.
   579. The CD3 binding molecule of embodiment 578, which has the configuration depicted in FIG. 2Q.
   580. The CD3 binding molecule of embodiment 578, which has the configuration depicted in FIG. 2R.
   581. The CD3 binding molecule of embodiment 578, which has the configuration depicted in FIG. 2S.
   582. The CD3 binding molecule of any one of embodiments 577 to 581, which has any of the configurations referred to as Tv1 through Tv24 in Section 7.6.2.
   583. The CD3 binding molecule of any one of embodiments 537 to 553, which is pentavalent.
   584. The CD3 binding molecule of embodiment 583, which has the configuration depicted in FIG. 2T.
   585. The CD3 binding molecule of embodiment 583 or embodiment 584, which has any of the configurations referred to as Pv 1 through Pv 100 in Section 7.6.3.
   586. The CD3 binding molecule of any one of embodiments 537 to 553, which is hexavalent.
   587. The CD3 binding molecule of embodiment 586, which has any one of the configurations depicted in FIGS. 2U-2V.
   588. The CD3 binding molecule of embodiment 587, which has the configuration depicted in FIG. 2U.
   589. The CD3 binding molecule of embodiment 587, which has the configuration depicted in FIG. 2V.
   590. The CD3 binding molecule of any one of embodiments 586 to 589, which has any of the configurations referred to as Hv1 through Hv330 in Section 7.6.4.
   591. The CD3 binding molecule of any one of embodiments 538 to 590, in which ABM1 is capable of binding CD3 at the same time ABM2 and ABM3 are bound to their target molecules.
   592. The CD3 binding molecule of any one of embodiments 459 to 591, wherein ABM2 specifically binds a TAA which is TSHR, CD171, CS-1, CLL-1, GD3, Tn Ag, FLT3, CD38, CD44v6, B7H3, KIT, IL-13Ra2, IL-11Ra, PSCA, PRSS21, VEGFR2, LewisY, CD24, PDGFR-beta, SSEA-4, MUC1, EGFR, NCAM, CAIX, LMP2, EphA2, fucosyl GM1, sLe, GM3, TGS5, HMWMAA, o-acetyl-GD2, GD2, folate receptor alpha, folate receptor beta, TEM1/CD248, TEM7R, CLDN6, GPRC5D, CXORF61, CD97, CD179a, ALK, polysialic acid, PLAC1, GloboH, NY-BR-1, UPK2, HAVCR1, ADRB3, PANX3, GPR20, LY6K, OR51E2, TAARP, WT1, ETV6-AML, sperm protein 17, XAGE1, Tie 2, MAD-CT-1, MAD-CT-2, Fos-related antigen 1, p53 mutant, hTERT, sarcoma translocation breakpoints, ML-IAP, ERG (TMPRSS2 ETS fusion gene), NA17, PAX3, Androgen receptor, Cyclin B1, MYCN, RhoC, CYP1B1, BORIS, SART3, PAX5, OY-TES1, LCK, AKAP-4, SSX2, CD79a, CD79b, CD72, LAIR1, FCAR, LILRA2, CD300LF, CLEC12A, BST2, EMR2, LY75, GPC3, FCRL5, IGLL1, CD19, CD20, CD30, ERBB2, ROR1, FLT3, TAAG72, CD22, CD33, GD2, BCMA, gp100Tn, FAP, tyrosinase, EPCAM, CEA, Igf-I receptor, EphB2, mesothelin, Cadherin17, CD32b, EGFRvIII, GPNMB, GPR64, HER3, LRP6, LYPD8, NKG2D, SLC34A2, SLC39A6, SLITRK6, or TACSTD2.
   593. The CD3 binding molecule of embodiment 592, wherein ABM2 comprises the CDR sequences of an antibody set forth in Table 15A.
   594. The CD3 binding molecule of embodiment 592, wherein ABM2 comprises the heavy and light chain variable region sequences of an antibody set forth in Table 15A.
   595. The CD3 binding molecule of any one of embodiments 591 to 594, wherein ABM2 binds to CD22.
   596. The CD3 binding molecule of any one of embodiments 591 to 594, wherein ABM2 binds to CS1.
   597. The CD3 binding molecule of any one of embodiments 591 to 594, wherein ABM2 binds to CD33.
   598. The CD3 binding molecule of any one of embodiments 591 to 594, ABM2 binds to GD2.
   599. The CD3 binding molecule of any one of embodiments 591 to 594, wherein ABM2 binds to BCMA.
   600. The CD3 binding molecule of any one of embodiments 591 to 594, wherein ABM2 binds to Tn.
   601. The CD3 binding molecule of any one of embodiments 591 to 594, wherein ABM2 binds to PSMA.
   602. The CD3 binding molecule of any one of embodiments 591 to 594, wherein ABM2 binds to ROR1.
   603. The CD3 binding molecule of any one of embodiments 591 to 594, wherein ABM2 binds to FLT3.
   604. The CD3 binding molecule of any one of embodiments 591 to 594, wherein ABM2 binds to TAAG72.
   605. The CD3 binding molecule of any one of embodiments 591 to 594, wherein ABM2 binds to FAP.
   606. The CD3 binding molecule of any one of embodiments 591 to 594, wherein ABM2 binds to CD38.
   607. The CD3 binding molecule of any one of embodiments 591 to 594, wherein ABM2 binds to CD44v6.
   608. The CD3 binding molecule of any one of embodiments 591 to 594, wherein ABM2 binds to CEA.
   609. The CD3 binding molecule of any one of embodiments 591 to 594, wherein ABM2 binds to EPCAM.
   610. The CD3 binding molecule of any one of embodiments 591 to 594, wherein ABM2 binds to PRSS21.
   611. The CD3 binding molecule of any one of embodiments 591 to 594, wherein ABM2 binds to B7H3.
   612. The CD3 binding molecule of any one of embodiments 591 to 594, wherein ABM2 binds to KIT.
   613. The CD3 binding molecule of any one of embodiments 591 to 594, wherein ABM2 binds to IL-13Ra2.
   614. The CD3 binding molecule of any one of embodiments 591 to 594, wherein ABM2 binds to CD30.
   615. The CD3 binding molecule of any one of embodiments 591 to 594, wherein ABM2 binds to GD3.
   616. The CD3 binding molecule of any one of embodiments 591 to 594, wherein ABM2 binds to CD171.
   617. The CD3 binding molecule of any one of embodiments 591 to 594, wherein ABM2 binds to IL-11Ra.
   618. The CD3 binding molecule of any one of embodiments 591 to 594, wherein ABM2 binds to PSCA.
   619. The CD3 binding molecule of any one of embodiments 591 to 594, wherein ABM2 binds to VEGFR2.
   620. The CD3 binding molecule of any one of embodiments 591 to 594, wherein ABM2 binds to LewisY.
   621. The CD3 binding molecule of any one of embodiments 591 to 594, wherein ABM2 binds to CD24.
   622. The CD3 binding molecule of any one of embodiments 591 to 594, wherein ABM2 binds to PDGFR-beta.
   623. The CD3 binding molecule of any one of embodiments 591 to 594, wherein ABM2 binds to SSEA-4.
   624. The CD3 binding molecule of any one of embodiments 591 to 594, wherein ABM2 binds to CD20.
   625. The CD3 binding molecule of any one of embodiments 591 to 594, wherein ABM2 binds to folate receptor alpha.
   626. The CD3 binding molecule of any one of embodiments 591 to 594, wherein ABM2 binds to ERBB2.
   627. The CD3 binding molecule of any one of embodiments 591 to 594, wherein ABM2 binds to MUC1.
   628. The CD3 binding molecule of any one of embodiments 591 to 594, wherein ABM2 binds to EGFR.
   629. The CD3 binding molecule of any one of embodiments 591 to 594, wherein ABM2 binds to NCAM.
   630. The CD3 binding molecule of any one of embodiments 591 to 594, wherein ABM2 binds to ephrin B2
   631. The CD3 binding molecule of any one of embodiments 591 to 594, wherein ABM2 binds to IGF-I receptor.
   632. The CD3 binding molecule of any one of embodiments 591 to 594, wherein ABM2 binds to CAIX.
   633. The CD3 binding molecule of any one of embodiments 591 to 594, wherein ABM2 binds to LMP2.
   634. The CD3 binding molecule of any one of embodiments 591 to 594, wherein ABM2 binds to gp100.
   635. The CD3 binding molecule of any one of embodiments 591 to 594, wherein ABM2 binds to tyrosinase.
   636. The CD3 binding molecule of any one of embodiments 591 to 594, wherein ABM2 binds to ephA2.
   637. The CD3 binding molecule of any one of embodiments 591 to 594, wherein ABM2 binds to mesothelin.
   638. The CD3 binding molecule of any one of embodiments 591 to 594, wherein ABM2 binds to ALK.
   639. The CD3 binding molecule of any one of embodiments 591 to 594, wherein ABM2 binds to CD19.
   640. The CD3 binding molecule of any one of embodiments 591 to 594, wherein ABM2 binds to CD97.
   641. The CD3 binding molecule of any one of embodiments 591 to 594, wherein ABM2 binds to CLDN6.
   642. The CD3 binding molecule of any one of embodiments 591 to 594, wherein ABM2 binds to EGFRvIII.
   643. The CD3 binding molecule of any one of embodiments 591 to 594, wherein ABM2 binds to folate receptor beta.
   644. The CD3 binding molecule of any one of embodiments 591 to 594, wherein ABM2 binds to GloboH.
   645. The CD3 binding molecule of any one of embodiments 591 to 594, wherein ABM2 binds to GPRC5D. 646. The CD3 binding molecule of any one of embodiments 591 to 594, wherein ABM2 binds to HMWMAA.
   647. The CD3 binding molecule of any one of embodiments 591 to 594, wherein ABM2 binds to LRP6.
   648. The CD3 binding molecule of any one of embodiments 591 to 594, wherein ABM2 binds to NY-BR-1.
   649. The CD3 binding molecule of any one of embodiments 591 to 594, wherein ABM2 binds to PLAC1.
   650. The CD3 binding molecule of any one of embodiments 591 to 594, wherein ABM2 binds to polysialic acid.
   651. The CD3 binding molecule of any one of embodiments 591 to 594, wherein ABM2 binds to TEM1/CD248.
   652. The CD3 binding molecule of any one of embodiments 591 to 594, wherein ABM2 binds to TSHR.
   653. The CD3 binding molecule of any one of embodiments 459 to 591, wherein ABM2 binds to CD19.
   654. The CD3 binding molecule of embodiment 653, wherein ABM2 comprises heavy chain CDRs having the amino acid sequences of CD19-H1, CD19-H2A, and CD19-H3 as set forth in Table 17 and light chain CDRs having the amino acid sequences of CD19-L1, CD19-L2, and CD19-L3 as set forth in Table 17.
   655. The CD3 binding molecule of embodiment 654, wherein ABM2 comprises a heavy chain variable region having the amino acid sequences of VHA as set forth in Table 17 and a light chain variable region having the amino acid sequences of VLA as set forth in Table 17.
   656. The CD3 binding molecule of embodiment 653, wherein ABM2 comprises heavy chain CDRs having the amino acid sequences of CD19-H1, CD19-H2B, and CD19-H3 as set forth in Table 17 and light chain CDRs having the amino acid sequences of CD19-L1, CD19-L2, and CD19-L3 as set forth in Table 17.
   657. The CD3 binding molecule of embodiment 656, wherein ABM2 comprises a heavy chain variable region having the amino acid sequences of VHB as set forth in Table 17 and a light chain variable region having the amino acid sequences of VLB as set forth in Table 17.
   658. The CD3 binding molecule of embodiment 653, wherein ABM2 comprises heavy chain CDRs having the amino acid sequences of CD19-H1, CD19-H2C, and CD19-H3 as set forth in Table 17 and light chain CDRs having the amino acid sequences of CD19-L1, CD19-L2, and CD19-L3 as set forth in Table 17.
   659. The CD3 binding molecule of embodiment 658, wherein ABM2 comprises a heavy chain variable region having the amino acid sequences of VHC as set forth in Table 17 and a light chain variable region having the amino acid sequences of VLB as set forth in Table 17.
   660. The CD3 binding molecule of embodiment 653, wherein ABM2 comprises heavy chain CDRs having the amino acid sequences of CD19-H1, CD19-H2D, and CD19-H3 as set forth in Table 17 and light chain CDRs having the amino acid sequences of CD19-L1, CD19-L2, and CD19-L3 as set forth in Table 17.
   661. The CD3 binding molecule of embodiment 660, wherein ABM2 comprises a heavy chain variable region having the amino acid sequences of VHD as set forth in Table 17 and a light chain variable region having the amino acid sequences of VLB as set forth in Table 17.
   662. The CD3 binding molecule of any one of embodiments 459 to 591, wherein the ABM2 binds BCMA.
   663. The CD3 binding molecule of embodiment 662, wherein ABM2 comprises the CDR sequences of BCMA-1.
   664. The CD3 binding molecule of embodiment 662, wherein ABM2 comprises the CDR sequences of BCMA-2.
   665. The CD3 binding molecule of embodiment 662, wherein ABM2 comprises the CDR sequences of BCMA-3.
   666. The CD3 binding molecule of embodiment 662, wherein ABM2 comprises the CDR sequences of BCMA-4.
   667. The CD3 binding molecule of embodiment 662, wherein ABM2 comprises the CDR sequences of BCMA-5.
   668. The CD3 binding molecule of embodiment 662, wherein ABM2 comprises the CDR sequences of BCMA-6.
   669. The CD3 binding molecule of embodiment 662, wherein ABM2 comprises the CDR sequences of BCMA-7.
   670. The CD3 binding molecule of embodiment 662, wherein ABM2 comprises the CDR sequences of BCMA-8.
   671. The CD3 binding molecule of embodiment 662, wherein ABM2 comprises the CDR sequences of BCMA-9.
   672. The CD3 binding molecule of embodiment 662, wherein ABM2 comprises the CDR sequences of BCMA-10.
   673. The CD3 binding molecule of embodiment 662, wherein ABM2 comprises the CDR sequences of BCMA-11.
   674. The CD3 binding molecule of embodiment 662, wherein ABM2 comprises the CDR sequences of BCMA-12.
   675. The CD3 binding molecule of embodiment 662, wherein ABM2 comprises the CDR sequences of BCMA-13.
   676. The CD3 binding molecule of embodiment 662, wherein ABM2 comprises the CDR sequences of BCMA-14.
   677. The CD3 binding molecule of embodiment 662, wherein ABM2 comprises the CDR sequences of BCMA-15.
   678. The CD3 binding molecule of embodiment 662, wherein ABM2 comprises the CDR sequences of BCMA-16.
   679. The CD3 binding molecule of embodiment 662, wherein ABM2 comprises the CDR sequences of BCMA-17.
   680. The CD3 binding molecule of embodiment 662, wherein ABM2 comprises the CDR sequences of BCMA-18.
   681. The CD3 binding molecule of embodiment 662, wherein ABM2 comprises the CDR sequences of BCMA-19.
   682. The CD3 binding molecule of embodiment 662, wherein ABM2 comprises the CDR sequences of BCMA-20.
   683. The CD3 binding molecule of embodiment 662, wherein ABM2 comprises the CDR sequences of BCMA-21.
   684. The CD3 binding molecule of embodiment 662, wherein ABM2 comprises the CDR sequences of BCMA-22.
   685. The CD3 binding molecule of embodiment 662, wherein ABM2 comprises the CDR sequences of BCMA-23.
   686. The CD3 binding molecule of embodiment 662, wherein ABM2 comprises the CDR sequences of BCMA-24.
   687. The CD3 binding molecule of embodiment 662, wherein ABM2 comprises the CDR sequences of BCMA-25.
   688. The CD3 binding molecule of embodiment 662, wherein ABM2 comprises the CDR sequences of BCMA-26.
   689. The CD3 binding molecule of embodiment 662, wherein ABM2 comprises the CDR sequences of BCMA-27.
   690. The CD3 binding molecule of embodiment 662, wherein ABM2 comprises the CDR sequences of BCMA-28.
   691. The CD3 binding molecule of embodiment 662, wherein ABM2 comprises the CDR sequences of BCMA-29.
   692. The CD3 binding molecule of embodiment 662, wherein ABM2 comprises the CDR sequences of BCMA-30.
   693. The CD3 binding molecule of embodiment 662, wherein ABM2 comprises the CDR sequences of BCMA-31.
   694. The CD3 binding molecule of embodiment 662, wherein ABM2 comprises the CDR sequences of BCMA-32.
   695. The CD3 binding molecule of embodiment 662, wherein ABM2 comprises the CDR sequences of BCMA-33.
   696. The CD3 binding molecule of embodiment 662, wherein ABM2 comprises the CDR sequences of BCMA-34.
   697. The CD3 binding molecule of embodiment 662, wherein ABM2 comprises the CDR sequences of BCMA-35.
   698. The CD3 binding molecule of embodiment 662, wherein ABM2 comprises the CDR sequences of BCMA-36.
   699. The CD3 binding molecule of embodiment 662, wherein ABM2 comprises the CDR sequences of BCMA-37.
   700. The CD3 binding molecule of embodiment 662, wherein ABM2 comprises the CDR sequences of BCMA-38.
   701. The CD3 binding molecule of embodiment 662, wherein ABM2 comprises the CDR sequences of BCMA-39.
   702. The CD3 binding molecule of embodiment 662, wherein ABM2 comprises the CDR sequences of BCMA-40.
   703. The CD3 binding molecule of any one of embodiments 663 to 702, wherein the CDRs are defined by Kabat numbering, as set forth in Table 16B and 16E.
   704. The CD3 binding molecule of any one of embodiments 663 to 702, wherein the CDRs are defined by Chothia numbering, as set forth in Table 16C and 16F.
   705. CD3 binding molecule of any one of embodiments 663 to 702, wherein the CDRs are defined by a combination of Kabat and Chothia numbering, as set forth in Table 16D and 16G.
   706. The CD3 binding molecule of embodiment 662, wherein ABM2 comprises the heavy and light chain variable sequences of BCMA-1, as set forth in Table 16A.
   707. The CD3 binding molecule of embodiment 662, wherein ABM2 comprises the heavy and light chain variable sequences of BCMA-2, as set forth in Table 16A.
   708. The CD3 binding molecule of embodiment 662, wherein ABM2 comprises the heavy and light chain variable sequences of BCMA-3, as set forth in Table 16A.
   709. The CD3 binding molecule of embodiment 662, wherein ABM2 comprises the heavy and light chain variable sequences of BCMA-4, as set forth in Table 16A.
   710. The CD3 binding molecule of embodiment 662, wherein ABM2 comprises the heavy and light chain variable sequences of BCMA-5, as set forth in Table 16A.
   711. The CD3 binding molecule of embodiment 662, wherein ABM2 comprises the heavy and light chain variable sequences of BCMA-6, as set forth in Table 16A.
   712. The CD3 binding molecule of embodiment 662, wherein ABM2 comprises the heavy and light chain variable sequences of BCMA-7, as set forth in Table 16A.
   713. The CD3 binding molecule of embodiment 662, wherein ABM2 comprises the heavy and light chain variable sequences of BCMA-8, as set forth in Table 16A.
   714. The CD3 binding molecule of embodiment 662, wherein ABM2 comprises the heavy and light chain variable sequences of BCMA-9, as set forth in Table 16A.
   715. The CD3 binding molecule of embodiment 662, wherein ABM2 comprises the heavy and light chain variable sequences of BCMA-10, as set forth in Table 16A.
   716. The CD3 binding molecule of embodiment 662, wherein ABM2 comprises the heavy and light chain variable sequences of BCMA-11, as set forth in Table 16A.
   717. The CD3 binding molecule of embodiment 662, wherein ABM2 comprises the heavy and light chain variable sequences of BCMA-12, as set forth in Table 16A.
   718. The CD3 binding molecule of embodiment 662, wherein ABM2 comprises the heavy and light chain variable sequences of BCMA-13, as set forth in Table 16A.
   719. The CD3 binding molecule of embodiment 662, wherein ABM2 comprises the heavy and light chain variable sequences of BCMA-14, as set forth in Table 16A.
   720. The CD3 binding molecule of embodiment 662, wherein ABM2 comprises the heavy and light chain variable sequences of BCMA-15, as set forth in Table 16A.
   721. The CD3 binding molecule of embodiment 662, wherein ABM2 comprises the heavy and light chain variable sequences of BCMA-16, as set forth in Table 16A.
   722. The CD3 binding molecule of embodiment 662, wherein ABM2 comprises the heavy and light chain variable sequences of BCMA-17, as set forth in Table 16A.
   723. The CD3 binding molecule of embodiment 662, wherein ABM2 comprises the heavy and light chain variable sequences of BCMA-18, as set forth in Table 16A.
   724. The CD3 binding molecule of embodiment 662, wherein ABM2 comprises the heavy and light chain variable sequences of BCMA-19, as set forth in Table 16A.
   725. The CD3 binding molecule of embodiment 662, wherein ABM2 comprises the heavy and light chain variable sequences of BCMA-20, as set forth in Table 16A.
   726. The CD3 binding molecule of embodiment 662, wherein ABM2 comprises the heavy and light chain variable sequences of BCMA-21, as set forth in Table 16A.
   727. The CD3 binding molecule of embodiment 662, wherein ABM2 comprises the heavy and light chain variable sequences of BCMA-22, as set forth in Table 16A.
   728. The CD3 binding molecule of embodiment 662, wherein ABM2 comprises the heavy and light chain variable sequences of BCMA-23, as set forth in Table 16A.
   729. The CD3 binding molecule of embodiment 662, wherein ABM2 comprises the heavy and light chain variable sequences of BCMA-24, as set forth in Table 16A.
   730. The CD3 binding molecule of embodiment 662, wherein ABM2 comprises the heavy and light chain variable sequences of BCMA-25, as set forth in Table 16A.
   731. The CD3 binding molecule of embodiment 662, wherein ABM2 comprises the heavy and light chain variable sequences of BCMA-26, as set forth in Table 16A.
   732. The CD3 binding molecule of embodiment 662, wherein ABM2 comprises the heavy and light chain variable sequences of BCMA-27, as set forth in Table 16A.
   733. The CD3 binding molecule of embodiment 662, wherein ABM2 comprises the heavy and light chain variable sequences of BCMA-28, as set forth in Table 16A.
   734. The CD3 binding molecule of embodiment 662, wherein ABM2 comprises the heavy and light chain variable sequences of BCMA-29, as set forth in Table 16A.
   735. The CD3 binding molecule of embodiment 662, wherein ABM2 comprises the heavy and light chain variable sequences of BCMA-30, as set forth in Table 16A.
   736. The CD3 binding molecule of embodiment 662, wherein ABM2 comprises the heavy and light chain variable sequences of BCMA-31, as set forth in Table 16A.
   737. The CD3 binding molecule of embodiment 662, wherein ABM2 comprises the heavy and light chain variable sequences of BCMA-32, as set forth in Table 16A.
   738. The CD3 binding molecule of embodiment 662, wherein ABM2 comprises the heavy and light chain variable sequences of BCMA-33, as set forth in Table 16A.
   739. The CD3 binding molecule of embodiment 662, wherein ABM2 comprises the heavy and light chain variable sequences of BCMA-34, as set forth in Table 16A.
   740. The CD3 binding molecule of embodiment 662, wherein ABM2 comprises the heavy and light chain variable sequences of BCMA-35, as set forth in Table 16A.
   741. The CD3 binding molecule of embodiment 662, wherein ABM2 comprises the heavy and light chain variable sequences of BCMA-36, as set forth in Table 16A.
   742. The CD3 binding molecule of embodiment 662, wherein ABM2 comprises the heavy and light chain variable sequences of BCMA-37, as set forth in Table 16A.
   743. The CD3 binding molecule of embodiment 662, wherein ABM2 comprises the heavy and light chain variable sequences of BCMA-38, as set forth in Table 16A.
   744. The CD3 binding molecule of embodiment 662, wherein ABM2 comprises the heavy and light chain variable sequences of BCMA-39, as set forth in Table 16A.
   745. The CD3 binding molecule of embodiment 662, wherein ABM2 comprises the heavy and light chain variable sequences of BCMA-40, as set forth in Table 16A.
   746. The CD3 binding molecule of any one of embodiments 538 to 745, wherein ABM3 binds CD2.
   747. The CD3 binding molecule of embodiment 746, wherein ABM3 is a non-immunoglobulin scaffold based ABM.
   748. The CD3 binding molecule of embodiment 747, wherein ABM3 is a Kunitz domain, an Adnexin, an Affibody, a DARPin, an Avimer, an Anticalin, a Lipocalin, a Centyrin, a Versabody, a Knottin, an Adnectin, a Pronectin, an Affitin/Nanofitin, an Affilin, an Atrimer/Tetranectin, a bicyclic peptide, a cys-knot, a Fn3 scaffold, an Obody, a Tn3, an Affimer, BD, an Adhiron, a Duocalin, an Alphabody, an Armadillo Repeat Protein, a Repebody, or a Fynomer.
   749. The CD3 binding molecule of embodiment 747, wherein ABM3 comprises a receptor binding domain of a CD2 ligand.
   750. The CD3 binding molecule of embodiment 746, wherein ABM3 is a CD58 moiety.
   751. The CD3 binding molecule of embodiment 750, wherein the CD58 moiety comprises the amino acid sequence of CD58-1 as set forth in Table 14.
   752. The CD3 binding molecule of embodiment 750, wherein the CD58 moiety comprises the amino acid sequence of CD58-2 as set forth in Table 14.
   753. The CD3 binding molecule of embodiment 750, wherein the CD58 moiety comprises the amino acid sequence of CD58-3 as set forth in Table 14.
   754. The CD3 binding molecule of embodiment 753, wherein the amino acid designated as B is a phenylalanine.
   755. The CD3 binding molecule of embodiment 753, wherein the amino acid designated as B is a serine.
   756. The CD3 binding molecule of any one of embodiments 753 to 755, wherein the amino acid designated as J is a valine.
   757. The CD3 binding molecule of any one of embodiments 753 to 755, wherein the amino acid designated as J is a lysine.
   758. The CD3 binding molecule of any one of embodiments 753 to 757, wherein the amino acid designated as 0 is a valine.
   759. The CD3 binding molecule of any one of embodiments 753 to 757, wherein the amino acid designated as 0 is a glutamine.
   760. The CD3 binding molecule of any one of embodiments 753 to 759, wherein the amino acid designated as U is a valine.
   761. The CD3 binding molecule of any one of embodiments 753 to 759, wherein the amino acid designated as U is a lysine.
   762. The CD3 binding molecule of any one of embodiments 753 to 761, wherein the amino acid designated as X is a threonine.
   763. The CD3 binding molecule of any one of embodiments 753 to 761, wherein the amino acid designated as X is a serine.
   764. The CD3 binding molecule of any one of embodiments 753 to 763, wherein the amino acid designated as Z is a leucine.
   765. The CD3 binding molecule of any one of embodiments 753 to 763, wherein the amino acid designated as Z is a glycine.
   766. The CD3 binding molecule of embodiment 750, wherein the CD58 moiety comprises the amino acid sequence of CD58-4 as set forth in Table 14.
   767. The CD3 binding molecule of embodiment 750, wherein the CD58 moiety comprises the amino acid sequence of CD58-5 as set forth in Table 14.
   768. The CD3 binding molecule of embodiment 767, wherein the amino acid designated as J is a valine.
   769. The CD3 binding molecule of embodiment 767, wherein the amino acid designated as J is a lysine.
   770. The CD3 binding molecule of any one of embodiments 767 to 769, wherein the amino acid designated as 0 is a valine.
   771. The CD3 binding molecule of any one of embodiments 767 to 769, wherein the amino acid designated as 0 is a glutamine.
   772. The CD3 binding molecule of embodiment 746, wherein ABM3 is a CD48 moiety.
   773. The CD3 binding molecule of embodiment 772, wherein the CD48 moiety has at least 70% sequence identity to amino acids 27-220 of the amino acid sequence of Uniprot identifier P09326.
   774. The CD3 binding molecule of embodiment 772, wherein the CD48 moiety has at least 80% sequence identity to amino acids 27-220 of the amino acid sequence of Uniprot identifier P09326.
   775. The CD3 binding molecule of embodiment 772, wherein the CD48 moiety has at least 90% sequence identity to amino acids 27-220 of the amino acid sequence of Uniprot identifier P09326.
   776. The CD3 binding molecule of embodiment 772, wherein the CD48 moiety has at least 95% sequence identity to amino acids 27-220 of the amino acid sequence of Uniprot identifier P09326.
   777. The CD3 binding molecule of embodiment 772, wherein the CD48 moiety has at least 99% sequence identity to amino acids 27-220 of the amino acid sequence of Uniprot identifier P09326.
   778. The CD3 binding molecule of embodiment 746, wherein ABM3 is an immunoglobulin scaffold based ABM.
   779. The CD3 binding molecule of embodiment 778, wherein ABM3 is an antibody, an antibody fragment, an scFv, a dsFv, a Fv, a Fab, an scFab, a (Fab′)2, a single domain antibody (SDAB), a VH or VL domain, or a camelid VHH domain.
   780. The CD3 binding molecule of embodiment 778, wherein ABM3 is an scFv.
   781. The CD3 binding molecule of embodiment 778, wherein ABM3 is a Fab.
   782. The CD3 binding molecule of embodiment 781, wherein ABM3 is a Fab heterodimer.
   783. The CD3 binding molecule of embodiment 778, wherein ABM3 is an antibody or an antigen-binding domain thereof.
   784. The CD3 binding molecule of any one of embodiments 778 to 783, wherein ABM3 comprises the CDR sequences of CD2-1.
   785. The CD3 binding molecule of embodiment 784, wherein ABM3 comprises the heavy and light chain variable sequences of CD2-1.
   786. The CD3 binding molecule of embodiment 784, wherein ABM3 comprises the heavy and light chain variable sequences of hu1CD2-1.
   787. The CD3 binding molecule of embodiment 784, wherein ABM3 comprises the heavy and light chain variable sequences of hu2CD2-1.
   788. The CD3 binding molecule of embodiment 784, wherein ABM3 comprises the CDR sequences of Medi 507.
   789. The CD3 binding molecule of embodiment 788, wherein ABM3 comprises the heavy and light chain variable sequences of Medi 507.
   790. The CD3 binding molecule of any one of embodiments 538 to 591, wherein ABM2 and ABM3 each bind specifically to a TAA (“TAA 1” and “TAA 2,” respectively).
   791. The CD3 binding molecule of embodiment 790, wherein ABM3 is a non-immunoglobulin scaffold based ABM.
   792. The CD3 binding molecule of embodiment 791, wherein if TAA is a receptor, ABM3 comprises a receptor binding domain of a ligand of the receptor, and if TAA is a ligand, ABM3 comprises a ligand binding domain of a receptor of the ligand.
   793. The CD3 binding molecule of embodiment 791, wherein ABM3 is a Kunitz domain, an Adnexin, an Affibody, a DARPin, an Avimer, an Anticalin, a Lipocalin, a Centyrin, a Versabody, a Knottin, an Adnectin, a Pronectin, an Affitin/Nanofitin, an Affilin, an Atrimer/Tetranectin, a bicyclic peptide, a cys-knot, a Fn3 scaffold, an Obody, a Tn3, an Affimer, BD, an Adhiron, a Duocalin, an Alphabody, an Armadillo Repeat Protein, a Repebody, or a Fynomer.
   794. The CD3 binding molecule of embodiment 790, wherein ABM3 is an immunoglobulin scaffold based ABM.
   795. The CD3 binding molecule of embodiment 794, wherein ABM3 is an antibody, an antibody fragment, an scFv, a dsFv, a Fv, a Fab, an scFab, a (Fab′)2, a single domain antibody (SDAB), a VH or VL domain, or a camelid VHH domain.
   796. The CD3 binding molecule of embodiment 795, wherein ABM3 is an antibody or an antigen-binding domain thereof.
   797. The CD3 binding molecule of embodiment 795, wherein ABM3 is an scFv.
   798. The CD3 binding molecule of embodiment 795, wherein ABM3 is a Fab.
   799. The CD3 binding molecule of embodiment 798, wherein ABM3 is a Fab heterodimer.
   800. The CD3 binding molecule of any one of embodiments 790 to 799, wherein TAA 1 and TAA 2 are each independently selected from CD19, CD20, CD22, CD123, BCMA, CD33, CLL1, CD138, CS1, CD38, CD133, FLT3, CD52, TNFRSF13C, TNFRSF13B, CXCR4, PD-L1, LY9, CD200, FCGR2B, CD21, CD23, CD24, CD40L, CD72, CD79a, and CD79b, and optionally wherein ABM2 and/or ABM3 comprise CDR sequences of antibodies set forth in Table 15B, or wherein ABM2 and/or ABM3 comprise the heavy and light chain variable regions of antibodies set forth in Table 15B.
   801. The CD3 binding molecule of embodiment 800, wherein TAA 1 is CD19.
   802. The CD3 binding molecule of embodiment 800, wherein TAA 1 is CD20.
   803. The CD3 binding molecule of embodiment 800, wherein TAA 1 is CD22.
   804. The CD3 binding molecule of embodiment 800, wherein TAA 1 is CD123.
   805. The CD3 binding molecule of embodiment 800, wherein TAA 1 is BCMA.
   806. The CD3 binding molecule of embodiment 800, wherein TAA 1 is CD33.
   807. The CD3 binding molecule of embodiment 800, wherein TAA 1 is CLL1.
   808. The CD3 binding molecule of embodiment 800, wherein TAA 1 is CD138.
   809. The CD3 binding molecule of embodiment 800, wherein TAA 1 is CS1.
   810. The CD3 binding molecule of embodiment 800, wherein TAA 1 is CD38.
   811. The CD3 binding molecule of embodiment 800, wherein TAA 1 is CD133.
   812. The CD3 binding molecule of embodiment 800, wherein TAA 1 is FLT3.
   813. The CD3 binding molecule of embodiment 800, wherein TAA 1 is CD52.
   814. The CD3 binding molecule of embodiment 800, wherein TAA 1 is TNFRSF13C.
   815. The CD3 binding molecule of embodiment 800, wherein TAA 1 is TNFRSF13B.
   816. The CD3 binding molecule of embodiment 800, wherein TAA 1 is CXCR4.
   817. The CD3 binding molecule of embodiment 800, wherein TAA 1 is PD-L1.
   818. The CD3 binding molecule of embodiment 800, wherein TAA 1 is LY9.
   819. The CD3 binding molecule of embodiment 800, wherein TAA 1 is CD200.
   820. The CD3 binding molecule of embodiment 800, wherein TAA 1 is FCGR2B.
   821. The CD3 binding molecule of embodiment 800, wherein TAA 1 is CD21.
   822. The CD3 binding molecule of embodiment 800, wherein TAA 1 is CD23.
   823. The CD3 binding molecule of embodiment 800, wherein TAA 1 is CD24.
   824. The CD3 binding molecule of embodiment 800, wherein TAA 1 is CD40L.
   825. The CD3 binding molecule of embodiment 800, wherein TAA 1 is CD72.
   826. The CD3 binding molecule of embodiment 800, wherein TAA 1 is CD79a.
   827. The CD3 binding molecule of embodiment 800, wherein TAA 1 is CD79b.
   828. The CD3 binding molecule of any one of embodiments 800 or 802 to 827, wherein TAA 2 is CD19.
   829. The CD3 binding molecule of any one of embodiments 800 to 801 or 803 to 827, wherein TAA 2 is CD20.
   830. The CD3 binding molecule of any one of embodiments 800 to 802 or 804 to 827, wherein TAA 2 is CD22.
   831. The CD3 binding molecule of any one of embodiments 800 to 803 or 805 to 827, wherein TAA 2 is CD123.
   832. The CD3 binding molecule of any one of embodiments 800 to 804 or 806 to 827, wherein TAA 2 is BCMA.
   833. The CD3 binding molecule of any one of embodiments 800 to 805 or 807 to 827, wherein TAA 2 is CD33.
   834. The CD3 binding molecule of any one of embodiments 800 to 806 or 808 to 827, wherein TAA 2 is CLL1.
   835. The CD3 binding molecule of any one of embodiments 800 to 807 or 809 to 827, wherein TAA 2 is CD138.
   836. The CD3 binding molecule of any one of embodiments 800 to 808 or 810 to 827, wherein TAA 2 is CS1.
   837. The CD3 binding molecule of any one of embodiments 800 to 809 or 811 to 827, wherein TAA 2 is CD38.
   838. The CD3 binding molecule of any one of embodiments 800 to 810 or 812 to 827, wherein TAA 2 is CD133.
   839. The CD3 binding molecule of any one of embodiments 800 to 811 or 813 to 827, wherein TAA 2 is FLT3.
   840. The CD3 binding molecule of any one of embodiments 800 to 812 or 814 to 827, wherein TAA 2 is CD52.
   841. The CD3 binding molecule of any one of embodiments 800 to 813 or 815 to 827, wherein TAA 2 is TNFRSF13C.
   842. The CD3 binding molecule of any one of embodiments 800 to 814 or 816 to 827, wherein TAA 2 is TNFRSF13B.
   843. The CD3 binding molecule of any one of embodiments 800 to 815 or 817 to 827, wherein TAA 2 is CXCR4.
   844. The CD3 binding molecule of any one of embodiments 800 to 816 or 818 to 827, wherein TAA 2 is PD-L1.
   845. The CD3 binding molecule of any one of embodiments 800 to 817 or 819 to 827, wherein TAA 2 is LY9.
   846. The CD3 binding molecule of any one of embodiments 800 to 818 or 820 to 827, wherein TAA 2 is CD200.
   847. The CD3 binding molecule of any one of embodiments 800 to 819 or 821 to 827, wherein TAA 2 is FCGR2B.
   848. The CD3 binding molecule of any one of embodiments 800 to 820 or 822 to 827, wherein TAA 2 is CD21.
   849. The CD3 binding molecule of any one of embodiments 800 to 821 or 823 to 827, wherein TAA 2 is CD23.
   850. The CD3 binding molecule of any one of embodiments 800 to 822 or 824 to 827, wherein TAA 2 is CD24.
   851. The CD3 binding molecule of any one of embodiments 800 to 823 or 825 to 827, wherein TAA 2 is CD40L.
   852. The CD3 binding molecule of any one of embodiments 800 to 824 or 826 to 827, wherein TAA 2 is CD72.
   853. The CD3 binding molecule of any one of embodiments 800 to 825 or 827, wherein TAA 2 is CD79a.
   854. The CD3 binding molecule of any one of embodiments 800 to 826, wherein TAA 2 is CD79b.
   855. The CD3 binding molecule of any one of embodiments 790 to 854, wherein when ABM2 or ABM3 specifically binds to CD19, ABM2 or ABM3 comprises heavy chain CDRs having the amino acid sequences of CD19-H1, CD19-H2A, and CD19-H3 as set forth in Table 17 and light chain CDRs having the amino acid sequences of CD19-L1, CD19-L2, and CD19-L3 as set forth in Table 17.
   856. The CD3 binding molecule of embodiment 855, wherein ABM2 or ABM3 comprises a heavy chain variable region having the amino acid sequences of VHA as set forth in Table 17 and a light chain variable region having the amino acid sequences of VLA as set forth in Table 17.
   857. The CD3 binding molecule of any one of embodiments 790 to 854, wherein when ABM2 or ABM3 specifically binds to CD19, ABM2 or ABM3 comprises heavy chain CDRs having the amino acid sequences of CD19-H1, CD19-H2B, and CD19-H3 as set forth in Table 17 and light chain CDRs having the amino acid sequences of CD19-L1, CD19-L2, and CD19-L3 as set forth in Table 17.
   858. The CD3 binding molecule of embodiment 857, wherein ABM2 or ABM3 comprises a heavy chain variable region having the amino acid sequences of VHB as set forth in Table 17 and a light chain variable region having the amino acid sequences of VLB as set forth in Table 17.
   859. The CD3 binding molecule of any one of embodiments 790 to 854, wherein when ABM2 or ABM3 specifically binds to CD19, ABM2 or ABM3 comprises heavy chain CDRs having the amino acid sequences of CD19-H1, CD19-H2C, and CD19-H3 as set forth in Table 17 and light chain CDRs having the amino acid sequences of CD19-L1, CD19-L2, and CD19-L3 as set forth in Table 17.
   860. The CD3 binding molecule of embodiment 859, wherein ABM2 or ABM3 comprises a heavy chain variable region having the amino acid sequences of VHC as set forth in Table 17 and a light chain variable region having the amino acid sequences of VLB as set forth in Table 17.
   861. The CD3 binding molecule of any one of embodiments 790 to 854, wherein when ABM2 or ABM3 specifically binds to CD19, ABM2 or ABM3 comprises heavy chain CDRs having the amino acid sequences of CD19-H1, CD19-H2D, and CD19-H3 as set forth in Table 17 and light chain CDRs having the amino acid sequences of CD19-L1, CD19-L2, and CD19-L3 as set forth in Table 17.
   862. The CD3 binding molecule of embodiment 861, wherein ABM2 or ABM3 comprises a heavy chain variable region having the amino acid sequences of VHD as set forth in Table 17 and a light chain variable region having the amino acid sequences of VLB as set forth in Table 17.
   863. The CD3 binding molecule of any one of embodiments 790 to 854, wherein when ABM2 or ABM3 specifically binds to BCMA, ABM2 or ABM3 comprises the CDR sequences of any one of BCMA-1 to BMCA-40.
   864. The CD3 binding molecule of embodiment 863, wherein ABM2 or ABM3 comprises the CDR sequences of BCMA-1.
   865. The CD3 binding molecule of embodiment 863, wherein ABM2 or ABM3 comprises the CDR sequences of BCMA-2.
   866. The CD3 binding molecule of embodiment 863, wherein ABM2 or ABM3 comprises the CDR sequences of BCMA-3.
   867. The CD3 binding molecule of embodiment 863, wherein ABM2 or ABM3 comprises the CDR sequences of BCMA-4.
   868. The CD3 binding molecule of embodiment 863, wherein ABM2 or ABM3 comprises the CDR sequences of BCMA-5.
   869. The CD3 binding molecule of embodiment 863, wherein ABM2 or ABM3 comprises the CDR sequences of BCMA-6.
   870. The CD3 binding molecule of embodiment 863, wherein ABM2 or ABM3 comprises the CDR sequences of BCMA-7.
   871. The CD3 binding molecule of embodiment 863, wherein ABM2 or ABM3 comprises the CDR sequences of BCMA-8.
   872. The CD3 binding molecule of embodiment 863, wherein ABM2 or ABM3 comprises the CDR sequences of BCMA-9.
   873. The CD3 binding molecule of embodiment 863, wherein ABM2 or ABM3 comprises the CDR sequences of BCMA-10.
   874. The CD3 binding molecule of embodiment 863, wherein ABM2 or ABM3 comprises the CDR sequences of BCMA-11.
   875. The CD3 binding molecule of embodiment 863, wherein ABM2 or ABM3 comprises the CDR sequences of BCMA-12.
   876. The CD3 binding molecule of embodiment 863, wherein ABM2 or ABM3 comprises the CDR sequences of BCMA-13.
   877. The CD3 binding molecule of embodiment 863, wherein ABM2 or ABM3 comprises the CDR sequences of BCMA-14.
   878. The CD3 binding molecule of embodiment 863, wherein ABM2 or ABM3 comprises the CDR sequences of BCMA-15.
   879. The CD3 binding molecule of embodiment 863, wherein ABM2 or ABM3 comprises the CDR sequences of BCMA-16.
   880. The CD3 binding molecule of embodiment 863, wherein ABM2 or ABM3 comprises the CDR sequences of BCMA-17.
   881. The CD3 binding molecule of embodiment 863, wherein ABM2 or ABM3 comprises the CDR sequences of BCMA-18.
   882. The CD3 binding molecule of embodiment 863, wherein ABM2 or ABM3 comprises the CDR sequences of BCMA-19.
   883. The CD3 binding molecule of embodiment 863, wherein ABM2 or ABM3 comprises the CDR sequences of BCMA-20.
   884. The CD3 binding molecule of embodiment 863, wherein ABM2 or ABM3 comprises the CDR sequences of BCMA-21.
   885. The CD3 binding molecule of embodiment 863, wherein ABM2 or ABM3 comprises the CDR sequences of BCMA-22.
   886. The CD3 binding molecule of embodiment 863, wherein ABM2 or ABM3 comprises the CDR sequences of BCMA-23.
   887. The CD3 binding molecule of embodiment 863, wherein ABM2 or ABM3 comprises the CDR sequences of BCMA-24.
   888. The CD3 binding molecule of embodiment 863, wherein ABM2 or ABM3 comprises the CDR sequences of BCMA-25.
   889. The CD3 binding molecule of embodiment 863, wherein ABM2 or ABM3 comprises the CDR sequences of BCMA-26.
   890. The CD3 binding molecule of embodiment 863, wherein ABM2 or ABM3 comprises the CDR sequences of BCMA-27.
   891. The CD3 binding molecule of embodiment 863, wherein ABM2 or ABM3 comprises the CDR sequences of BCMA-28.
   892. The CD3 binding molecule of embodiment 863, wherein ABM2 or ABM3 comprises the CDR sequences of BCMA-29.
   893. The CD3 binding molecule of embodiment 863, wherein ABM2 or ABM3 comprises the CDR sequences of BCMA-30.
   894. The CD3 binding molecule of embodiment 863, wherein ABM2 or ABM3 comprises the CDR sequences of BCMA-31.
   895. The CD3 binding molecule of embodiment 863, wherein ABM2 or ABM3 comprises the CDR sequences of BCMA-32.
   896. The CD3 binding molecule of embodiment 863, wherein ABM2 or ABM3 comprises the CDR sequences of BCMA-33.
   897. The CD3 binding molecule of embodiment 863, wherein ABM2 or ABM3 comprises the CDR sequences of BCMA-34.
   898. Th The CD3 binding molecule of embodiment 863, wherein ABM2 or ABM3 comprises the CDR sequences of BCMA-35.
   899. The CD3 binding molecule of embodiment 863, wherein ABM2 or ABM3 comprises the CDR sequences of BCMA-36.
   900. The CD3 binding molecule of embodiment 863, wherein ABM2 or ABM3 comprises the CDR sequences of BCMA-37.
   901. The CD3 binding molecule of embodiment 863, wherein ABM2 or ABM3 comprises the CDR sequences of BCMA-38.
   902. The CD3 binding molecule of embodiment 863, wherein ABM2 or ABM3 comprises the CDR sequences of BCMA-39.
   903. The CD3 binding molecule of embodiment 863, wherein ABM2 or ABM3 comprises the CDR sequences of BCMA-40.
   904. The CD3 binding molecule of any one of embodiments 863 to 903, wherein the CDRs are defined by Kabat numbering, as set forth in Table 16B and 16E.
   905. The CD3 binding molecule of any one of embodiments 863 to 903, wherein the CDRs are defined by Chothia numbering, as set forth in Table 16C and 16F.
   906. CD3 binding molecule of any one of embodiments 863 to 903, wherein the CDRs are defined by a combination of Kabat and Chothia numbering, as set forth in Table 16D and 16G.
   907. The CD3 binding molecule of embodiment 863, wherein ABM2 or ABM3 comprises the heavy and light chain variable sequences of BCMA-1, as set forth in Table 16A.
   908. The CD3 binding molecule of embodiment 863, wherein ABM2 or ABM3 comprises the heavy and light chain variable sequences of BCMA-2, as set forth in Table 16A.
   909. The CD3 binding molecule of embodiment 863, wherein ABM2 or ABM3 comprises the heavy and light chain variable sequences of BCMA-3, as set forth in Table 16A.
   910. The CD3 binding molecule of embodiment 863, wherein ABM2 or ABM3 comprises the heavy and light chain variable sequences of BCMA-4, as set forth in Table 16A.
   911. The CD3 binding molecule of embodiment 863, wherein ABM2 or ABM3 comprises the heavy and light chain variable sequences of BCMA-5, as set forth in Table 16A.
   912. The CD3 binding molecule of embodiment 863, wherein ABM2 or ABM3 comprises the heavy and light chain variable sequences of BCMA-6, as set forth in Table 16A.
   913. The CD3 binding molecule of embodiment 863, wherein ABM2 or ABM3 comprises the heavy and light chain variable sequences of BCMA-7, as set forth in Table 16A.
   914. The CD3 binding molecule of embodiment 863, wherein ABM2 or ABM3 comprises the heavy and light chain variable sequences of BCMA-8, as set forth in Table 16A.
   915. The CD3 binding molecule of embodiment 863, wherein ABM2 or ABM3 comprises the heavy and light chain variable sequences of BCMA-9, as set forth in Table 16A.
   916. The CD3 binding molecule of embodiment 863, wherein ABM2 or ABM3 comprises the heavy and light chain variable sequences of BCMA-10, as set forth in Table 16A.
   917. The CD3 binding molecule of embodiment 863, wherein ABM2 or ABM3 comprises the heavy and light chain variable sequences of BCMA-11, as set forth in Table 16A.
   918. The CD3 binding molecule of embodiment 863, wherein ABM2 or ABM3 comprises the heavy and light chain variable sequences of BCMA-12, as set forth in Table 16A.
   919. The CD3 binding molecule of embodiment 863, wherein ABM2 or ABM3 comprises the heavy and light chain variable sequences of BCMA-13, as set forth in Table 16A.
   920. The CD3 binding molecule of embodiment 863, wherein ABM2 or ABM3 comprises the heavy and light chain variable sequences of BCMA-14, as set forth in Table 16A.
   921. The CD3 binding molecule of embodiment 863, wherein ABM2 or ABM3 comprises the heavy and light chain variable sequences of BCMA-15, as set forth in Table 16A.
   922. The CD3 binding molecule of embodiment 863, wherein ABM2 or ABM3 comprises the heavy and light chain variable sequences of BCMA-16, as set forth in Table 16A.
   923. The CD3 binding molecule of embodiment 863, wherein ABM2 or ABM3 comprises the heavy and light chain variable sequences of BCMA-17, as set forth in Table 16A.
   924. The CD3 binding molecule of embodiment 863, wherein ABM2 or ABM3 comprises the heavy and light chain variable sequences of BCMA-18, as set forth in Table 16A.
   925. The CD3 binding molecule of embodiment 863, wherein ABM2 or ABM3 comprises the heavy and light chain variable sequences of BCMA-19, as set forth in Table 16A.
   926. The CD3 binding molecule of embodiment 863, wherein ABM2 or ABM3 comprises the heavy and light chain variable sequences of BCMA-20, as set forth in Table 16A.
   927. The CD3 binding molecule of embodiment 863, wherein ABM2 or ABM3 comprises the heavy and light chain variable sequences of BCMA-21, as set forth in Table 16A.
   928. The CD3 binding molecule of embodiment 863, wherein ABM2 or ABM3 comprises the heavy and light chain variable sequences of BCMA-22, as set forth in Table 16A.
   929. The CD3 binding molecule of embodiment 863, wherein ABM2 or ABM3 comprises the heavy and light chain variable sequences of BCMA-23, as set forth in Table 16A.
   930. The CD3 binding molecule of embodiment 863, wherein ABM2 or ABM3 comprises the heavy and light chain variable sequences of BCMA-24, as set forth in Table 16A.
   931. The CD3 binding molecule of embodiment 863, wherein ABM2 or ABM3 comprises the heavy and light chain variable sequences of BCMA-25, as set forth in Table 16A.
   932. The CD3 binding molecule of embodiment 863, wherein ABM2 or ABM3 comprises the heavy and light chain variable sequences of BCMA-26, as set forth in Table 16A.
   933. The CD3 binding molecule of embodiment 863, wherein ABM2 or ABM3 comprises the heavy and light chain variable sequences of BCMA-27, as set forth in Table 16A.
   934. The CD3 binding molecule of embodiment 863, wherein ABM2 or ABM3 comprises the heavy and light chain variable sequences of BCMA-28, as set forth in Table 16A.
   935. The CD3 binding molecule of embodiment 863, wherein ABM2 or ABM3 comprises the heavy and light chain variable sequences of BCMA-29, as set forth in Table 16A.
   936. The CD3 binding molecule of embodiment 863, wherein ABM2 or ABM3 comprises the heavy and light chain variable sequences of BCMA-30, as set forth in Table 16A.
   937. The CD3 binding molecule of embodiment 863, wherein ABM2 or ABM3 comprises the heavy and light chain variable sequences of BCMA-31, as set forth in Table 16A.
   938. The CD3 binding molecule of embodiment 863, wherein ABM2 or ABM3 comprises the heavy and light chain variable sequences of BCMA-32, as set forth in Table 16A.
   939. The CD3 binding molecule of embodiment 863, wherein ABM2 or ABM3 comprises the heavy and light chain variable sequences of BCMA-33, as set forth in Table 16A.
   940. The CD3 binding molecule of embodiment 863, wherein ABM2 or ABM3 comprises the heavy and light chain variable sequences of BCMA-34, as set forth in Table 16A.
   941. The CD3 binding molecule of embodiment 863, wherein ABM2 or ABM3 comprises the heavy and light chain variable sequences of BCMA-35, as set forth in Table 16A.
   942. The CD3 binding molecule of embodiment 863, wherein ABM2 or ABM3 comprises the heavy and light chain variable sequences of BCMA-36, as set forth in Table 16A.
   943. The CD3 binding molecule of embodiment 863, wherein ABM2 or ABM3 comprises the heavy and light chain variable sequences of BCMA-37, as set forth in Table 16A.
   944. The CD3 binding molecule of embodiment 863, wherein ABM2 or ABM3 comprises the heavy and light chain variable sequences of BCMA-38, as set forth in Table 16A.
   945. The CD3 binding molecule of embodiment 863, wherein ABM2 or ABM3 comprises the heavy and light chain variable sequences of BCMA-39, as set forth in Table 16A.
   946. The CD3 binding molecule of embodiment 863, wherein ABM2 or ABM3 comprises the heavy and light chain variable sequences of BCMA-40, as set forth in Table 16A.
   947. The CD3 binding molecule of any one of embodiments 1 to 946, which comprises a first variant Fc region and a second variant Fc region that together form an Fc heterodimer.
   948. The CD3 binding molecule of embodiment 947, wherein the first and second variant Fc regions comprise the amino acid substitutions S364K/E357Q:L368D/K370S.
   949. The CD3 binding molecule of any one of embodiments 947, wherein the first and second variant Fc regions comprise the amino acid substitutions L368D/K370S:S364.
   950. The CD3 binding molecule of any one of embodiments 947 to 949, wherein the first and second variant Fc regions comprise the amino acid substitutions L368E/K370S:S364K.
   951. The CD3 binding molecule of embodiment 947, wherein the first and second variant Fc regions comprise the amino acid substitutions T411T/E360E/Q362E:D401K.
   952. The CD3 binding molecule of embodiment 947, wherein the first and second variant Fc regions comprise the amino acid substitutions L368D 370S:S364/E357L.
   953. The CD3 binding molecule of embodiment 947, wherein the first and second variant Fc regions comprise the amino acid substitutions 370S:S364K/E357Q.
   954. The CD3 binding molecule of embodiment 947, wherein the first and second variant Fc regions comprise the amino acid substitutions of any one of the steric variants listed in FIG. 4 of WO 2014/110601 (reproduced in Table 4).
   955. The CD3 binding molecule of embodiment 947, wherein the first and second variant Fc regions comprise the amino acid substitutions of any one of the variants listed in FIG. 5 of WO 2014/110601 (reproduced in Table 4).
   956. The CD3 binding molecule of embodiment 947, wherein the first and second variant Fc regions comprise the amino acid substitutions of any one of the variants listed in FIG. 6 of WO 2014/110601 (reproduced in Table 4).
   957. The CD3 binding molecule of any one of embodiments 947 to 956, wherein at least one of the Fc regions comprises an ablation variant modification.
   958. The CD3 binding molecule of embodiment 957, wherein the ablation variant modifications are selected from Table 3.
   959. The CD3 binding molecule of embodiment 958, wherein the ablation variant modification comprises G236R.
   960. The CD3 binding molecule of embodiment 958, wherein the ablation variant modification comprises S239G.
   961. The CD3 binding molecule of embodiment 958, wherein the ablation variant modification comprises S239K.
   962. The CD3 binding molecule of embodiment 958, wherein the ablation variant modification comprises S239Q.
   963. The CD3 binding molecule of embodiment 958, wherein the ablation variant modification comprises S239R.
   964. The CD3 binding molecule of embodiment 958, wherein the ablation variant modification comprises V266D.
   965. The CD3 binding molecule of embodiment 958, wherein the ablation variant modification comprises S267K.
   966. The CD3 binding molecule of embodiment 958, wherein the ablation variant modification comprises S267R.
   967. The CD3 binding molecule of embodiment 958, wherein the ablation variant modification comprises H268K.
   968. The CD3 binding molecule of embodiment 958, wherein the ablation variant modification comprises E269R.
   969. The CD3 binding molecule of embodiment 958, wherein the ablation variant modification comprises 299R.
   970. The CD3 binding molecule of embodiment 958, wherein the ablation variant modification comprises 299K
   971. The CD3 binding molecule of embodiment 958, wherein the ablation variant modification comprises K322A
   972. The CD3 binding molecule of embodiment 958, wherein the ablation variant modification comprises A327G
   973. The CD3 binding molecule of embodiment 958, wherein the ablation variant modification comprises A327L
   974. The CD3 binding molecule of embodiment 958, wherein the ablation variant modification comprises A327N
   975. The CD3 binding molecule of embodiment 958, wherein the ablation variant modification comprises A327Q
   976. The CD3 binding molecule of embodiment 958, wherein the ablation variant modification comprises L328E
   977. The CD3 binding molecule of embodiment 958, wherein the ablation variant modification comprises L328R
   978. The CD3 binding molecule of embodiment 958, wherein the ablation variant modification comprises P329A
   979. The CD3 binding molecule of embodiment 958, wherein the ablation variant modification comprises P329H
   980. The CD3 binding molecule of embodiment 958, wherein the ablation variant modification comprises P329K
   981. The CD3 binding molecule of embodiment 958, wherein the ablation variant modification comprises A330L
   982. The CD3 binding molecule of embodiment 958, wherein the ablation variant modification comprises A330S/P331S
   983. The CD3 binding molecule of embodiment 958, wherein the ablation variant modification comprises 1332K
   984. The CD3 binding molecule of embodiment 958, wherein the ablation variant modification comprises 1332R
   985. The CD3 binding molecule of embodiment 958, wherein the ablation variant modification comprises V266D/A327Q
   986. The CD3 binding molecule of embodiment 958, wherein the ablation variant modification comprises V266D/P329K
   987. The CD3 binding molecule of embodiment 958, wherein the ablation variant modification comprises G236R/L328R
   988. The CD3 binding molecule of embodiment 958, wherein the ablation variant modification comprises E233P/L234V/L235A/G236del/S239K.
   989. The CD3 binding molecule of embodiment 958, wherein the ablation variant modification comprises E233P/L234V/L235A/G236del/S267K.
   990. The CD3 binding molecule of embodiment 958, wherein the ablation variant modification comprises E233P/L234V/L235A/G236del/S239K/A327G.
   991. The CD3 binding molecule of embodiment 958, wherein the ablation variant modification comprises E233P/L234V/L235A/G236del/S267K/A327G.
   992. The CD3 binding molecule of embodiment 958, wherein the ablation variant modification comprises E233P/L234V/L235A/G236del.
   993. The CD3 binding molecule of embodiment 958, wherein the ablation variant modification comprises S239K/S267K.
   994. The CD3 binding molecule of embodiment 958, wherein the ablation variant modification comprises 267K/P329K.
   995. The CD3 binding molecule of any one of embodiments 957 to 994, wherein both variant Fc regions comprise the ablation variant modification.
   996. The CD3 binding molecule of any one of embodiments 947 to 995, wherein at least one of the Fc regions further comprises pl variant substitutions.
   997. The CD3 binding molecule of embodiment 996 wherein the pl variant substitutions are selected from Table 6.
   998. The CD3 binding molecule of embodiment 997, wherein the pl variant substitutions comprise the substitutions present in pl_ISO(−).
   999. The CD3 binding molecule of embodiment 997, wherein the pl variant substitutions comprise the substitutions present in pl_(−)_isosteric_A.
   1000. The CD3 binding molecule of embodiment 997, wherein the pl variant substitutions comprise the substitutions present in pl_(−)_isosteric_B.
   1001. The CD3 binding molecule of embodiment 997, wherein the pl variant substitutions comprise the substitutions present in PL_ISO(+RR).
   1002. The CD3 binding molecule of embodiment 997, wherein the pl variant substitutions comprise the substitutions present in pl_ISO(+).
   1003. The CD3 binding molecule of embodiment 997, wherein the pl variant substitutions comprise the substitutions present in pl_(+)_isosteric_A.
   1004. The CD3 binding molecule of embodiment 997, wherein the pl variant substitutions comprise the substitutions present in pl_(+)_isosteric_B.
   1005. The CD3 binding molecule of embodiment 997, wherein the pl variant substitutions comprise the substitutions present in pl_(+)_isosteric_E269Q/E272Q.
   1006. The CD3 binding molecule of embodiment 997, wherein the pl variant substitutions comprise the substitutions present in pl_(+)_isosteric_E269Q/E283Q.
   1007. The CD3 binding molecule of embodiment 997, wherein the pl variant substitutions comprise the substitutions present in pl_(+)_isosteric_E2720/E283Q.
   1008. The CD3 binding molecule of embodiment 997, wherein the pl variant substitutions comprise the substitutions present in pl_(+)_isosteric_E269Q.
   1009. The CD3 binding molecule of any one of embodiments 947 to 1008, wherein the first and/or second Fc region further comprises one or more amino acid substitution(s) selected from 434A, 434S, 428L, 308F, 259I, 428L/434S, 259I/308F, 436I/428L, 4361 or V/434S, 436V/428L, 252Y, 252Y/254T/256E, 2591/308F/428L, 236A, 239D, 239E, 332E, 332D, 239D/332E, 267D, 267E, 328F, 267E/328F, 236A/332E, 239D/332E/330Y, 239D, 332E/330L, 236R, 328R, 236R/328R, 236N/267E, 243L, 298A and 299T.
   1010. The CD3 binding molecule of any one of embodiments 947 to 1008, wherein the first and/or second Fc region further comprises one or more amino acid substitution comprises the amino acid substitution 434A, 434S or 434V.
   1011. The CD3 binding molecule of embodiment 1010, wherein the first and/or second Fc region further comprises one or more amino acid substitution comprises the amino acid substitution 428L.
   1012. The CD3 binding molecule of any one of embodiments 1010 to 1011, wherein the first and/or second Fc region further comprises one or more amino acid substitution comprises the amino acid substitution 308F.
   1013. The CD3 binding molecule of any one of embodiments 1010 to 1012, wherein the first and/or second Fc region further comprises one or more amino acid substitution comprises the amino acid substitution 259I.
   1014. The CD3 binding molecule of any one of embodiments 1010 to 1013, wherein the first and/or second Fc region further comprises one or more amino acid substitution comprises the amino acid substitution 436I.
   1015. The CD3 binding molecule of any one of embodiments 1010 to 1014, wherein the first and/or second Fc region further comprises one or more amino acid substitution comprises the amino acid substitution 252Y.
   1016. The CD3 binding molecule of any one of embodiments 1010 to 1015, wherein the first and/or second Fc region further comprises one or more amino acid substitution comprises the amino acid substitution 254T.
   1017. The CD3 binding molecule of any one of embodiments 1010 to 1016, wherein the first and/or second Fc region further comprises one or more amino acid substitution comprises the amino acid substitution 256E.
   1018. The CD3 binding molecule of any one of embodiments 1010 to 1017, wherein the first and/or second Fc region further comprises one or more amino acid substitution comprises the amino acid substitution 239D or 239E.
   1019. The CD3 binding molecule of any one of embodiments 1010 to 1018, wherein the first and/or second Fc region further comprises one or more amino acid substitution comprises the amino acid substitution 332E or 332D.
   1020. The CD3 binding molecule of any one of embodiments 1010 to 1019, wherein the first and/or second Fc region further comprises one or more amino acid substitution comprises the amino acid substitution 267D or 267E.
   1021. The CD3 binding molecule of any one of embodiments 1010 to 1020, wherein the first and/or second Fc region further comprises one or more amino acid substitution comprises the amino acid substitution 330L.
   1022. The CD3 binding molecule of any one of embodiments 1010 to 1021, wherein the first and/or second Fc region further comprises one or more amino acid substitution comprises the amino acid substitution 236R or 236N.
   1023. The CD3 binding molecule of any one of embodiments 1010 to 1022, wherein the first and/or second Fc region further comprises one or more amino acid substitution comprises the amino acid substitution 328R.
   1024. The CD3 binding molecule of any one of embodiments 1010 to 1023, wherein the first and/or second Fc region further comprises one or more amino acid substitution comprises the amino acid substitution 243L.
   1025. The CD3 binding molecule of any one of embodiments 1010 to 1024, wherein the first and/or second Fc region further comprises one or more amino acid substitution comprises the amino acid substitution 298A.
   1026. The CD3 binding molecule of any one of embodiments 1010 to 1025, wherein the first and/or second Fc region further comprises one or more amino acid substitution comprises the amino acid substitution 299T.
   1027. The CD3 binding molecule of embodiment 947, wherein:

[0903] (a) the first and second variant Fc regions comprise the amino acid substitutions S364K/E357Q:L368D/K370S;

[0904] (b) the first and/or second variant Fc regions comprises the ablation variant modifications E233P/L234V/L235A/G236del/S267K, and

[0905] (c) the first and/or second variant Fc regions comprises the pl variant substitutions N208D/Q295E/N384D/Q418E/N421D (pl_(−)_isosteric_A).

1028. The CD3 binding molecule of embodiment 1027, wherein the first variant Fc region comprises the ablation variant modifications E233P/L234V/L235A/G236del/S267K.
1029. The CD3 binding molecule of any one of embodiments 1027 to 1028, wherein the second variant Fc region comprises the ablation variant modifications E233P/L234V/L235A/G236del/S267K.
1030. The CD3 binding molecule of any one of embodiments 1027 to 1029, wherein the first variant Fc region comprises the pl variant substitutions N208D/Q295E/N384D/Q418E/N421D (pl_(−)_isosteric_A).
1031. The CD3 binding molecule of any one of embodiments 1027 to 1030, wherein the second variant Fc region comprises the pl variant substitutions N208D/Q295E/N384D/Q418E/N421D (pl_(−)_isosteric_A).
1032. The CD3 binding molecule of any one of embodiments 1 to 946, which comprises an Fc domain.
1033. The CD3 binding molecule of embodiment 1032, wherein the Fc domain is an Fc heterodimer.
1034. The CD3 binding molecule of embodiment 1033, wherein the Fc heterodimer comprises any of the Fc modifications set forth in Table 4. 1035. The CD3 binding molecule of embodiment 1033, wherein the Fc heterodimer comprises knob-in-hole (“KIH”) modifications.
1036. The CD3 binding molecule of any one of embodiments to 1033 to 1035, which comprises at least one of the Fc modifications designated as Fc 1 through Fc 150.
1037. The CD3 binding molecule of embodiment 1036, which comprises at least one of the Fc modifications designated as Fc 1 through Fc 5.
1038. The CD3 binding molecule of embodiment 1036, which comprises at least one of the Fc modifications designated as Fc 6 through Fc 10.
1039. The CD3 binding molecule of embodiment 1036, which comprises at least one of the Fc modifications designated as Fc 11 through Fc 15.
1040. The CD3 binding molecule of embodiment 1036, which comprises at least one of the Fc modifications designated as Fc 16 through Fc 20.
1041. The CD3 binding molecule of embodiment 1036, which comprises at least one of the Fc modifications designated as Fc 21 through Fc 25.
1042. The CD3 binding molecule of embodiment 1036, which comprises at least one of the Fc modifications designated as Fc 26 through Fc 30.
1043. The CD3 binding molecule of embodiment 1036, which comprises at least one of the Fc modifications designated as Fc 31 through Fc 35.
1044. The CD3 binding molecule of embodiment 1036, which comprises at least one of the Fc modifications designated as Fc 36 through Fc 40.
1045. The CD3 binding molecule of embodiment 1036, which comprises at least one of the Fc modifications designated as Fc 41 through Fc 45.
1046. The CD3 binding molecule of embodiment 1036, which comprises at least one of the Fc modifications designated as Fc 46 through Fc 50.
1047. The CD3 binding molecule of embodiment 1036, which comprises at least one of the Fc modifications designated as Fc 51 through Fc 55.
1048. The CD3 binding molecule of embodiment 1036, which comprises at least one of the Fc modifications designated as Fc 56 through Fc 60.
1049. The CD3 binding molecule of embodiment 1036, which comprises at least one of the Fc modifications designated as Fc 61 through Fc 65.
1050. The CD3 binding molecule of embodiment 1036, which comprises at least one of the Fc modifications designated as Fc 66 through Fc 70.
1051. The CD3 binding molecule of embodiment 1036, which comprises at least one of the Fc modifications designated as Fc 71 through Fc 75.
1052. The CD3 binding molecule of embodiment 1036, which comprises at least one of the Fc modifications designated as Fc 76 through Fc 80.
1053. The CD3 binding molecule of embodiment 1036, which comprises at least one of the Fc modifications designated as Fc 81 through Fc 85.
1054. The CD3 binding molecule of embodiment 1036, which comprises at least one of the Fc modifications designated as Fc 86 through Fc 90.
1055. The CD3 binding molecule of embodiment 1036, which comprises at least one of the Fc modifications designated as Fc 91 through Fc 95.
1056. The CD3 binding molecule of embodiment 1036, which comprises at least one of the Fc modifications designated as Fc 96 through Fc 100.
1057. The CD3 binding molecule of embodiment 1036, which comprises at least one of the Fc modifications designated as Fc 101 through Fc 105.
1058. The CD3 binding molecule of embodiment 1036, which comprises at least one of the Fc modifications designated as Fc 106 through Fc 110.
1059. The CD3 binding molecule of embodiment 1036, which comprises at least one of the Fc modifications designated as Fc 111 through Fc 115.
1060. The CD3 binding molecule of embodiment 1036, which comprises at least one of the Fc modifications designated as Fc 116 through Fc 120.
1061. The CD3 binding molecule of embodiment 1036, which comprises at least one of the Fc modifications designated as Fc 121 through Fc 125.
1062. The CD3 binding molecule of embodiment 1036, which comprises at least one of the Fc modifications designated as Fc 126 through Fc 130.
1063. The CD3 binding molecule of embodiment 1036, which comprises at least one of the Fc modifications designated as Fc 131 through Fc 135.
1064. The CD3 binding molecule of embodiment 1036, which comprises at least one of the Fc modifications designated as Fc 136 through Fc 140.
1065. The CD3 binding molecule of embodiment 1036, which comprises at least one of the Fc modifications designated as Fc 141 through Fc 145.
1066. The CD3 binding molecule of embodiment 1036, which comprises at least one of the Fc modifications designated as Fc 146 through Fc 150.
1067. The CD3 binding molecule of any one of embodiments 1032 to 1066, wherein the Fc domain has altered effector function.
1068. The CD3 binding molecule of embodiment 1067, wherein the Fc domain has altered binding to one or more Fc receptors.
1069. The CD3 binding molecule of embodiment 1068, wherein the one or more Fc receptors comprise FcRN.
1070. The CD3 binding molecule of embodiment 1068 or embodiment 1069, wherein the one or more Fc receptors comprise leukocyte receptors.
1071. The CD3 binding molecule of any one of embodiments 1032 to 1070, wherein the Fc has modified disulfide bond architecture.
1072. The CD3 binding molecule of any one of embodiments 1032 to 1071, wherein the Fc has altered glycosylation patterns.
1073. The CD3 binding molecule of any one of embodiments 1032 to 1072, wherein the Fc comprises a hinge region.
1074. The CD3 binding molecule of embodiment 1073, wherein the hinge region comprises any one of the hinge regions described in Section 7.4.2
1075. The CD3 binding molecule of embodiment 1074, wherein the hinge region comprises the amino acid sequence of the hinge region designated H1.
1076. The CD3 binding molecule of embodiment 1074, wherein the hinge region comprises the amino acid sequence of the hinge region designated H2.
1077. The CD3 binding molecule of embodiment 1074, wherein the hinge region comprises the amino acid sequence of the hinge region designated H3.
1078. The CD3 binding molecule of embodiment 1074, wherein the hinge region comprises the amino acid sequence of the hinge region designated H4.
1079. The CD3 binding molecule of embodiment 1074, wherein the hinge region comprises the amino acid sequence of the hinge region designated H5.
1080. The CD3 binding molecule of embodiment 1074, wherein the hinge region comprises the amino acid sequence of the hinge region designated H6.
1081. The CD3 binding molecule of embodiment 1074, wherein the hinge region comprises the amino acid sequence of the hinge region designated H7.
1082. The CD3 binding molecule of embodiment 1074, wherein the hinge region comprises the amino acid sequence of the hinge region designated H8.
1083. The CD3 binding molecule of embodiment 1074, wherein the hinge region comprises the amino acid sequence of the hinge region designated H9.
1084. The CD3 binding molecule of embodiment 1074, wherein the hinge region comprises the amino acid sequence of the hinge region designated H10.
1085. The CD3 binding molecule of embodiment 1074, wherein the hinge region comprises the amino acid sequence of the hinge region designated H11.
1086. The CD3 binding molecule of embodiment 1074, wherein the hinge region comprises the amino acid sequence of the hinge region designated H12.
1087. The CD3 binding molecule of embodiment 1074, wherein the hinge region comprises the amino acid sequence of the hinge region designated H13.
1088. The CD3 binding molecule of embodiment 1074, wherein the hinge region comprises the amino acid sequence of the hinge region designated H14.
1089. The CD3 binding molecule of embodiment 1074, wherein the hinge region comprises the amino acid sequence of the hinge region designated H15.
1090. The CD3 binding molecule of embodiment 1074, wherein the hinge region comprises the amino acid sequence of the hinge region designated H16.
1091. The CD3 binding molecule of embodiment 1074, wherein the hinge region comprises the amino acid sequence of the hinge region designated H17.
1092. The CD3 binding molecule of embodiment 1074, wherein the hinge region comprises the amino acid sequence of the hinge region designated H18.
1093. The CD3 binding molecule of embodiment 1074, wherein the hinge region comprises the amino acid sequence of the hinge region designated H19.
1094. The CD3 binding molecule of embodiment 1074, wherein the hinge region comprises the amino acid sequence of the hinge region designated H20.
1095. The CD3 binding molecule of embodiment 1074, wherein the hinge region comprises the amino acid sequence of the hinge region designated H21.
1096. The CD3 binding molecule of any one of embodiments 1 to 1095, which comprises at least one scFv domain.
1097. The CD3 binding molecule of embodiment 1096, wherein at least one scFv comprises a linker connecting the VH and VL domains.
1098. The CD3 binding molecule of embodiment 1097, wherein the linker is 5 to 25 amino acids in length.
1099. The CD3 binding molecule of embodiment 1098, wherein the linker is 12 to 20 amino acids in length.
1100. The CD3 binding molecule of any one of embodiments 1097 to 1099, wherein the linker is a charged linker and/or a flexible linker.
1101. The CD3 binding molecule of any one of embodiments 1097 to 1100, wherein the linker is selected from any one of linkers L1 through L54.
1102. The CD3 binding molecule of embodiment 1101, wherein the linker region comprises the amino acid sequence of the linker designated L1.
1103. The CD3 binding molecule of embodiment 1101, wherein the linker region comprises the amino acid sequence of the linker designated L2.
1104. The CD3 binding molecule of embodiment 1101, wherein the linker region comprises the amino acid sequence of the linker designated L3.
1105. The CD3 binding molecule of embodiment 1101, wherein the linker region comprises the amino acid sequence of the linker designated L4.
1106. The CD3 binding molecule of embodiment 1101, wherein the linker region comprises the amino acid sequence of the linker designated L5.
1107. The CD3 binding molecule of embodiment 1101, wherein the linker region comprises the amino acid sequence of the linker designated L6.
1108. The CD3 binding molecule of embodiment 1101, wherein the linker region comprises the amino acid sequence of the linker designated L7.
1109. The CD3 binding molecule of embodiment 1101, wherein the linker region comprises the amino acid sequence of the linker designated L8.
1110. The CD3 binding molecule of embodiment 1101, wherein the linker region comprises the amino acid sequence of the linker designated L9.
1111. The CD3 binding molecule of embodiment 1101, wherein the linker region comprises the amino acid sequence of the linker designated L10.
1112. The CD3 binding molecule of embodiment 1101, wherein the linker region comprises the amino acid sequence of the linker designated L11.
1113. The CD3 binding molecule of embodiment 1101, wherein the linker region comprises the amino acid sequence of the linker designated L12.
1114. The CD3 binding molecule of embodiment 1101, wherein the linker region comprises the amino acid sequence of the linker designated L13.
1115. The CD3 binding molecule of embodiment 1101, wherein the linker region comprises the amino acid sequence of the linker designated L14.
1116. The CD3 binding molecule of embodiment 1101, wherein the linker region comprises the amino acid sequence of the linker designated L15.
1117. The CD3 binding molecule of embodiment 1101, wherein the linker region comprises the amino acid sequence of the linker designated L16.
1118. The CD3 binding molecule of embodiment 1101, wherein the linker region comprises the amino acid sequence of the linker designated L17.
1119. The CD3 binding molecule of embodiment 1101, wherein the linker region comprises the amino acid sequence of the linker designated L18.
1120. The CD3 binding molecule of embodiment 1101, wherein the linker region comprises the amino acid sequence of the linker designated L19.
1121. The CD3 binding molecule of embodiment 1101, wherein the linker region comprises the amino acid sequence of the linker designated L20.
1122. The CD3 binding molecule of embodiment 1101, wherein the linker region comprises the amino acid sequence of the linker designated L21.
1123. The CD3 binding molecule of embodiment 1101, wherein the linker region comprises the amino acid sequence of the linker designated L22.
1124. The CD3 binding molecule of embodiment 1101, wherein the linker region comprises the amino acid sequence of the linker designated L23.
1125. The CD3 binding molecule of embodiment 1101, wherein the linker region comprises the amino acid sequence of the linker designated L24.
1126. The CD3 binding molecule of embodiment 1101, wherein the linker region comprises the amino acid sequence of the linker designated L25.
1127. The CD3 binding molecule of embodiment 1101, wherein the linker region comprises the amino acid sequence of the linker designated L26.
1128. The CD3 binding molecule of embodiment 1101, wherein the linker region comprises the amino acid sequence of the linker designated L27.
1129. The CD3 binding molecule of embodiment 1101, wherein the linker region comprises the amino acid sequence of the linker designated L28.
1130. The CD3 binding molecule of embodiment 1101, wherein the linker region comprises the amino acid sequence of the linker designated L29.
1131. The CD3 binding molecule of embodiment 1101, wherein the linker region comprises the amino acid sequence of the linker designated L30.
1132. The CD3 binding molecule of embodiment 1101, wherein the linker region comprises the amino acid sequence of the linker designated L31.
1133. The CD3 binding molecule of embodiment 1101, wherein the linker region comprises the amino acid sequence of the linker designated L32.
1134. The CD3 binding molecule of embodiment 1101, wherein the linker region comprises the amino acid sequence of the linker designated L33.
1135. The CD3 binding molecule of embodiment 1101, wherein the linker region comprises the amino acid sequence of the linker designated L34.
1136. The CD3 binding molecule of embodiment 1101, wherein the linker region comprises the amino acid sequence of the linker designated L35.
1137. The CD3 binding molecule of embodiment 1101, wherein the linker region comprises the amino acid sequence of the linker designated L36.
1138. The CD3 binding molecule of embodiment 1101, wherein the linker region comprises the amino acid sequence of the linker designated L37.
1139. The CD3 binding molecule of embodiment 1101, wherein the linker region comprises the amino acid sequence of the linker designated L38.
1140. The CD3 binding molecule of embodiment 1101, wherein the linker region comprises the amino acid sequence of the linker designated L39.
1141. The CD3 binding molecule of embodiment 1101, wherein the linker region comprises the amino acid sequence of the linker designated L40.
1142. The CD3 binding molecule of embodiment 1101, wherein the linker region comprises the amino acid sequence of the linker designated L41.
1143. The CD3 binding molecule of embodiment 1101, wherein the linker region comprises the amino acid sequence of the linker designated L42.
1144. The CD3 binding molecule of embodiment 1101, wherein the linker region comprises the amino acid sequence of the linker designated L43.
1145. The CD3 binding molecule of embodiment 1101, wherein the linker region comprises the amino acid sequence of the linker designated L44.
1146. The CD3 binding molecule of embodiment 1101, wherein the linker region comprises the amino acid sequence of the linker designated L45.
1147. The CD3 binding molecule of embodiment 1101, wherein the linker region comprises the amino acid sequence of the linker designated L46.
1148. The CD3 binding molecule of embodiment 1101, wherein the linker region comprises the amino acid sequence of the linker designated L47.
1149. The CD3 binding molecule of embodiment 1101, wherein the linker region comprises the amino acid sequence of the linker designated L48.
1150. The CD3 binding molecule of embodiment 1101, wherein the linker region comprises the amino acid sequence of the linker designated L49.
1151. The CD3 binding molecule of embodiment 1101, wherein the linker region comprises the amino acid sequence of the linker designated L50.
1152. The CD3 binding molecule of embodiment 1101, wherein the linker region comprises the amino acid sequence of the linker designated L51.
1153. The CD3 binding molecule of embodiment 1101, wherein the linker region comprises the amino acid sequence of the linker designated L52.
1154. The CD3 binding molecule of embodiment 1101, wherein the linker region comprises the amino acid sequence of the linker designated L53.
1155. The CD3 binding molecule of embodiment 1101, wherein the linker region comprises the amino acid sequence of the linker designated L54.
1156. The CD3 binding molecule of any one of embodiments 1 to 1155, which comprises at least one Fab domain.
1157. The CD3 binding molecule of embodiment 1156, wherein at least one Fab domain comprises any of the Fab heterodimerization modifications set forth in Table 2.
1158. The CD3 binding molecule of embodiment 1157, wherein at least one Fab domain comprises the Fab heterodimerization modifications designated as F1.
1159. The CD3 binding molecule of embodiment 1157, wherein at least one Fab domain comprises the Fab heterodimerization modifications designated as F2.
1160. The CD3 binding molecule of embodiment 1157, wherein at least one Fab domain comprises the Fab heterodimerization modifications designated as F3.
1161. The CD3 binding molecule of embodiment 1157, wherein at least one Fab domain comprises the Fab heterodimerization modifications designated as F4.
1162. The CD3 binding molecule of embodiment 1157, wherein at least one Fab domain comprises the Fab heterodimerization modifications designated as F5.
1163. The CD3 binding molecule of embodiment 1157, wherein at least one Fab domain comprises the Fab heterodimerization modifications designated as F6.
1164. The CD3 binding molecule of embodiment 1157, wherein at least one Fab domain comprises the Fab heterodimerization modifications designated as F7.
1165. The CD3 binding molecule of any one of embodiments 1 to 1164, which comprises at least two ABMs, an ABM and an ABM chain, or two ABM chains connected to one another via a linker.
1166. The CD3 binding molecule of embodiment 1165, wherein the linker is 5 to 25 amino acids in length.
1167. The CD3 binding molecule of embodiment 1166, wherein the linker is 12 to 20 amino acids in length.
1168. The CD3 binding molecule of any one of embodiments 1165 to 1167, wherein the linker is a charged linker and/or a flexible linker.
1169. The CD3 binding molecule of any one of embodiments 1165 to 1168, wherein the linker is selected from any one of linkers L1 through L54.
1170. The CD3 binding molecule of embodiment 1169, wherein the linker region comprises the amino acid sequence of the linker designated L1.
1171. The CD3 binding molecule of embodiment 1169, wherein the linker region comprises the amino acid sequence of the linker designated L2.
1172. The CD3 binding molecule of embodiment 1169, wherein the linker region comprises the amino acid sequence of the linker designated L3.
1173. The CD3 binding molecule of embodiment 1169, wherein the linker region comprises the amino acid sequence of the linker designated L4.
1174. The CD3 binding molecule of embodiment 1169, wherein the linker region comprises the amino acid sequence of the linker designated L5.
1175. The CD3 binding molecule of embodiment 1169, wherein the linker region comprises the amino acid sequence of the linker designated L6.
1176. The CD3 binding molecule of embodiment 1169, wherein the linker region comprises the amino acid sequence of the linker designated L7.
1177. The CD3 binding molecule of embodiment 1169, wherein the linker region comprises the amino acid sequence of the linker designated L8.
1178. The CD3 binding molecule of embodiment 1169, wherein the linker region comprises the amino acid sequence of the linker designated L9.
1179. The CD3 binding molecule of embodiment 1169, wherein the linker region comprises the amino acid sequence of the linker designated L10.
1180. The CD3 binding molecule of embodiment 1169, wherein the linker region comprises the amino acid sequence of the linker designated L11.
1181. The CD3 binding molecule of embodiment 1169, wherein the linker region comprises the amino acid sequence of the linker designated L12.
1182. The CD3 binding molecule of embodiment 1169, wherein the linker region comprises the amino acid sequence of the linker designated L13.
1183. The CD3 binding molecule of embodiment 1169, wherein the linker region comprises the amino acid sequence of the linker designated L14.
1184. The CD3 binding molecule of embodiment 1169, wherein the linker region comprises the amino acid sequence of the linker designated L15.
1185. The CD3 binding molecule of embodiment 1169, wherein the linker region comprises the amino acid sequence of the linker designated L16.
1186. The CD3 binding molecule of embodiment 1169, wherein the linker region comprises the amino acid sequence of the linker designated L17.
1187. The CD3 binding molecule of embodiment 1169, wherein the linker region comprises the amino acid sequence of the linker designated L18.
1188. The CD3 binding molecule of embodiment 1169, wherein the linker region comprises the amino acid sequence of the linker designated L19.
1189. The CD3 binding molecule of embodiment 1169, wherein the linker region comprises the amino acid sequence of the linker designated L20.
1190. The CD3 binding molecule of embodiment 1169, wherein the linker region comprises the amino acid sequence of the linker designated L21.
1191. The CD3 binding molecule of embodiment 1169, wherein the linker region comprises the amino acid sequence of the linker designated L22.
1192. The CD3 binding molecule of embodiment 1169, wherein the linker region comprises the amino acid sequence of the linker designated L23.
1193. The CD3 binding molecule of embodiment 1169, wherein the linker region comprises the amino acid sequence of the linker designated L24.
1194. The CD3 binding molecule of embodiment 1169, wherein the linker region comprises the amino acid sequence of the linker designated L25.
1195. The CD3 binding molecule of embodiment 1169, wherein the linker region comprises the amino acid sequence of the linker designated L26.
1196. The CD3 binding molecule of embodiment 1169, wherein the linker region comprises the amino acid sequence of the linker designated L27.
1197. The CD3 binding molecule of embodiment 1169, wherein the linker region comprises the amino acid sequence of the linker designated L28.
1198. The CD3 binding molecule of embodiment 1169, wherein the linker region comprises the amino acid sequence of the linker designated L29.
1199. The CD3 binding molecule of embodiment 1169, wherein the linker region comprises the amino acid sequence of the linker designated L30.
1200. The CD3 binding molecule of embodiment 1169, wherein the linker region comprises the amino acid sequence of the linker designated L31.
1201. The CD3 binding molecule of embodiment 1169, wherein the linker region comprises the amino acid sequence of the linker designated L32.
1202. The CD3 binding molecule of embodiment 1169, wherein the linker region comprises the amino acid sequence of the linker designated L33.
1203. The CD3 binding molecule of embodiment 1169, wherein the linker region comprises the amino acid sequence of the linker designated L34.
1204. The CD3 binding molecule of embodiment 1169, wherein the linker region comprises the amino acid sequence of the linker designated L35.
1205. The CD3 binding molecule of embodiment 1169, wherein the linker region comprises the amino acid sequence of the linker designated L36.
1206. The CD3 binding molecule of embodiment 1169, wherein the linker region comprises the amino acid sequence of the linker designated L37.
1207. The CD3 binding molecule of embodiment 1169, wherein the linker region comprises the amino acid sequence of the linker designated L38.
1208. The CD3 binding molecule of embodiment 1169, wherein the linker region comprises the amino acid sequence of the linker designated L39.
1209. The CD3 binding molecule of embodiment 1169, wherein the linker region comprises the amino acid sequence of the linker designated L40.
1210. The CD3 binding molecule of embodiment 1169, wherein the linker region comprises the amino acid sequence of the linker designated L41.
1211. The CD3 binding molecule of embodiment 1169, wherein the linker region comprises the amino acid sequence of the linker designated L42.
1212. The CD3 binding molecule of embodiment 1169, wherein the linker region comprises the amino acid sequence of the linker designated L43.
1213. The CD3 binding molecule of embodiment 1169, wherein the linker region comprises the amino acid sequence of the linker designated L44.
1214. The CD3 binding molecule of embodiment 1169, wherein the linker region comprises the amino acid sequence of the linker designated L45.
1215. The CD3 binding molecule of embodiment 1169, wherein the linker region comprises the amino acid sequence of the linker designated L46.
1216. The CD3 binding molecule of embodiment 1169, wherein the linker region comprises the amino acid sequence of the linker designated L47.
1217. The CD3 binding molecule of embodiment 1169, wherein the linker region comprises the amino acid sequence of the linker designated L48.
1218. The CD3 binding molecule of embodiment 1169, wherein the linker region comprises the amino acid sequence of the linker designated L49.
1219. The CD3 binding molecule of embodiment 1101, wherein the linker region comprises the amino acid sequence of the linker designated L50.
1220. The CD3 binding molecule of embodiment 1101, wherein the linker region comprises the amino acid sequence of the linker designated L51.
1221. The CD3 binding molecule of embodiment 1101, wherein the linker region comprises the amino acid sequence of the linker designated L52.
1222. The CD3 binding molecule of embodiment 1101, wherein the linker region comprises the amino acid sequence of the linker designated L53.
1223. The CD3 binding molecule of embodiment 1169, wherein the linker region comprises the amino acid sequence of the linker designated L54.
1224. The CD3 binding molecule of any one of embodiments 1 to 1223 for use as a medicament.
1225. A conjugate comprising the CD3 binding molecule of any one of embodiments 1 to 1223 and an agent.
1226. The conjugate of embodiment 1225, wherein the agent is a therapeutic agent, a diagnostic agent, a masking moiety, a cleavable moiety, a stabilizing agent, or any combination thereof.
1227. The conjugate of embodiment 1225, wherein the agent is any of the agents described in Section 7.13.
1228. The conjugate of any one of embodiments 1225 to 1227, wherein the CD3 binding molecule is conjugated to a radionuclide.
1229. The conjugate of any one of embodiments 1225 to 1227, wherein the CD3 binding molecule is conjugated to an alkylating agent.
1230. The conjugate of any one of embodiments 1225 to 1227, wherein the CD3 binding molecule is conjugated to a topoisomerase inhibitor, which is optionally a topoisomerase I inhibitor or a topoisomerase II inhibitor.
1231. The conjugate of any one of embodiments 1225 to 1227, wherein the CD3 binding molecule is conjugated to a DNA damaging agent.
1232. The conjugate of any one of embodiments 1225 to 1227, wherein the CD3 binding molecule is conjugated to a DNA intercalating agent, optionally a groove binding agent such as a minor groove binding agent.
1233. The conjugate of any one of embodiments 1225 to 1227, wherein the CD3 binding molecule is conjugated to a RNA/DNA antimetabolite.
1234. The conjugate of any one of embodiments 1225 to 1227, wherein the CD3 binding molecule is conjugated to a kinase inhibitor.
1235. The conjugate of any one of embodiments 1225 to 1227, wherein the CD3 binding molecule is conjugated to a protein synthesis inhibitor.
1236. The conjugate of any one of embodiments 1225 to 1227, wherein the CD3 binding molecule is conjugated to a histone deacetylase (HDAC) inhibitor.
1237. The conjugate of any one of embodiments 1225 to 1227, wherein the CD3 binding molecule is conjugated to a mitochondrial inhibitor, which is optionally an inhibitor of a phosphoryl transfer reaction in mitochondria.
1238. The conjugate of any one of embodiments 1225 to 1227, wherein the CD3 binding molecule is conjugated to an antimitotic agent.
1239. The conjugate of any one of embodiments 1225 to 1227, wherein the CD3 binding molecule is conjugated to a maytansinoid.
1240. The conjugate of any one of embodiments 1225 to 1227, wherein the CD3 binding molecule is conjugated to a kinesin inhibitor.
1241. The conjugate of any one of embodiments 1225 to 1227, wherein the CD3 binding molecule is conjugated to a kinesin-like protein KIF11 inhibitor.
1242. The conjugate of any one of embodiments 1225 to 1227, wherein the CD3 binding molecule is conjugated to a V-ATPase (vacuolar-type H+-ATPase) inhibitor.
1243. The conjugate of any one of embodiments 1225 to 1227, wherein the CD3 binding molecule is conjugated to a pro-apoptotic agent.
1244. The conjugate of any one of embodiments 1225 to 1227, wherein the CD3 binding molecule is conjugated to a Bcl2 (B-cell lymphoma 2) inhibitor.
1245. The conjugate of any one of embodiments 1225 to 1227, wherein the CD3 binding molecule is conjugated to a MCL1 (myeloid cell leukemia 1) inhibitor.
1246. The conjugate of any one of embodiments 1225 to 1227, wherein the CD3 binding molecule is conjugated to a HSP90 (heat shock protein 90) inhibitor.
1247. The conjugate of any one of embodiments 1225 to 1227, wherein the CD3 binding molecule is conjugated to an IAP (inhibitor of apoptosis) inhibitor.
1248. The conjugate of any one of embodiments 1225 to 1227, wherein the CD3 binding molecule is conjugated to a mTOR (mechanistic target of rapamycin) inhibitor.
1249. The conjugate of any one of embodiments 1225 to 1227, wherein the CD3 binding molecule is conjugated to a microtubule stabilizer.
1250. The conjugate of any one of embodiments 1225 to 1227, wherein the CD3 binding molecule is conjugated to a microtubule destabilizer.
1251. The conjugate of any one of embodiments 1225 to 1227, wherein the CD3 binding molecule is conjugated to an auristatin.
1252. The conjugate of any one of embodiments 1225 to 1227, wherein the CD3 binding molecule is conjugated to a dolastatin.
1253. The conjugate of any one of embodiments 1225 to 1227, wherein the CD3 binding molecule is conjugated to a MetAP (methionine aminopeptidase).
1254. The conjugate of any one of embodiments 1225 to 1227, wherein the CD3 binding molecule is conjugated to a CRM1 (chromosomal maintenance 1) inhibitor.
1255. The conjugate of any one of embodiments 1225 to 1227, wherein the CD3 binding molecule is conjugated to a DPPIV (dipeptidyl peptidase IV) inhibitor.
1256. The conjugate of any one of embodiments 1225 to 1227, wherein the CD3 binding molecule is conjugated to a proteasome inhibitor.
1257. The conjugate of any one of embodiments 1225 to 1227, wherein the CD3 binding molecule is conjugated to a protein synthesis inhibitor.
1258. The conjugate of any one of embodiments 1225 to 1227, wherein the CD3 binding molecule is conjugated to a CDK2 (cyclin-dependent kinase 2) inhibitor.
1259. The conjugate of any one of embodiments 1225 to 1227, wherein the CD3 binding molecule is conjugated to a CDK9 (cyclin-dependent kinase 9) inhibitor.
1260. The conjugate of any one of embodiments 1225 to 1227, wherein the CD3 binding molecule is conjugated to a RNA polymerase inhibitor.
1261. The conjugate of any one of embodiments 1225 to 1227, wherein the CD3 binding molecule is conjugated to a DHFR (dihydrofolate reductase) inhibitor.
1262. The conjugate of any one of embodiments 1225 to 1261, wherein the agent is attached to the TBM with a linker, which is optionally a cleavable linker or a non-cleavable linker, e.g., a linker as described in Section 7.13.2.
1263. A pharmaceutical composition comprising the CD3 binding molecule of any one of embodiments 1 to 1224 or the conjugate of any one of embodiments 1225 to 1262 and a pharmaceutically acceptable excipient.
1264. A method of activating T cells in a subject in need thereof, comprising administering to the subject an effective amount of the CD3 binding molecule of any one of embodiments 1 to 1224, the conjugate of any one of embodiments 1225 to 1262 or the pharmaceutical composition of embodiment 1263.
1265. The method of embodiment 1264, wherein the subject has a proliferative disease.
1266. The method of embodiment 1265, wherein the proliferative disease is a cancer or a precancerous condition.
1267. The method of embodiment 1265 or 1266, wherein the proliferative disease is a hematologic proliferative disease.
1268. The method of 1267, wherein the proliferative disease is a lymphoma, a leukemia, multiple myeloma, a chronic myeloproliferative neoplasm, a macroglobulinemia, a myelodysplastic syndrome, a myelodysplastic/myeloproliferative neoplasm, or a plasmacytic dendritic cell neoplasm.
1269. The method of embodiment 1268, wherein the proliferative disease is a lymphoma.
1270. The method of embodiment 1269, wherein the lymphoma is Hodgkin's lymphoma.
1271. The method of embodiment 1270, wherein the Hodgkin's lymphoma is nodular sclerosing Hodgkin's lymphoma, mixed-cellularity subtype Hodgkin's lymphoma, lymphocyte-rich or lymphocytic predominance Hodgkin's lymphoma, or lymphocyte depleted Hodgkin's lymphoma.
1272. The method of embodiment 1271, wherein the Hodgkin's lymphoma is nodular sclerosing Hodgkin's lymphoma.
1273. The method of embodiment 1271, wherein the Hodgkin's lymphoma is mixed-cellularity subtype Hodgkin's lymphoma.
1274. The method of embodiment 1271, wherein the Hodgkin's lymphoma is lymphocyte-rich or lymphocytic predominance Hodgkin's lymphoma.
1275. The method of embodiment 1271, wherein the Hodgkin's lymphoma is lymphocyte depleted Hodgkin's lymphoma.
1276. The method of embodiment 1269, wherein the lymphoma is non-Hodgkin's lymphoma.
1277. The method of embodiment 1276, wherein the non-Hodgkin's lymphoma is a B cell lymphoma or a T cell lymphoma.
1278. The method of embodiment 1277, wherein the non-Hodgkin's lymphoma is a B cell lymphoma.
1279. The method of embodiment 1277, wherein the non-Hodgkin's lymphoma is a T cell lymphoma
1280. The method of embodiment 1276, wherein the non-Hodgkin's lymphoma is diffuse large B-cell lymphoma (DLBCL), follicular lymphoma, chronic lymphocytic leukemia (CLL)/small lymphocytic lymphoma (SLL), mantle cell lymphoma (MCL), marginal zone lymphoma, Burkitt lymphoma, lymphoplasmacytic lymphoma (Waldenstrom macroglobulinemia), primary central nervous system (CNS) lymphoma, primary mediastinal large B-cell lymphoma, mediastinal grey-zone lymphoma (MGZL), splenic marginal zone B-cell lymphoma, extranodal marginal zone B-cell lymphoma of MALT, nodal marginal zone B-cell lymphoma, primary effusion lymphoma, anaplastic large cell lymphoma (ALCL), adult T-cell lymphoma, angiocentric lymphoma, angioimmunoblastic T-cell lymphoma, cutaneous T-cell lymphoma, extranodal natural killer/T-cell lymphoma, enteropathy type intestinal T-cell lymphoma, precursor T-lymphoblastic lymphoma, or unspecified peripheral T-cell lymphoma.
1281. The method of embodiment 1280, wherein the non-Hodgkin's lymphoma is diffuse large B-cell lymphoma (DLBCL).
1282. The method of embodiment 1280, wherein the non-Hodgkin's lymphoma is follicular lymphoma.
1283. The method of embodiment 1280, wherein the non-Hodgkin's lymphoma is chronic lymphocytic leukemia (CLL)/small lymphocytic lymphoma (SLL).
1284. The method of embodiment 1280, wherein the non-Hodgkin's lymphoma is mantle cell lymphoma (MCL), marginal zone lymphoma.
1285. The method of embodiment 1280, wherein the non-Hodgkin's lymphoma is Burkitt lymphoma.
1286. The method of embodiment 1280, wherein the non-Hodgkin's lymphoma is lymphoplasmacytic lymphoma (Waldenstrom macroglobulinemia).
1287. The method of embodiment 1280, wherein the non-Hodgkin's lymphoma is primary central nervous system (CNS) lymphoma.
1288. The method of embodiment 1280, wherein the non-Hodgkin's lymphoma is primary mediastinal large B-cell lymphoma.
1289. The method of embodiment 1280, wherein the non-Hodgkin's lymphoma is mediastinal grey-zone lymphoma (MGZL).
1290. The method of embodiment 1280, wherein the non-Hodgkin's lymphoma is splenic marginal zone B-cell lymphoma.
1291. The method of embodiment 1280, wherein the non-Hodgkin's lymphoma is extranodal marginal zone B-cell lymphoma of MALT.
1292. The method of embodiment 1280, wherein the non-Hodgkin's lymphoma is nodal marginal zone B-cell lymphoma.
1293. The method of embodiment 1280, wherein the non-Hodgkin's lymphoma is primary effusion lymphoma, anaplastic large cell lymphoma (ALCL).
1294. The method of embodiment 1280, wherein the non-Hodgkin's lymphoma is adult T-cell lymphoma.
1295. The method of embodiment 1280, wherein the non-Hodgkin's lymphoma is angiocentric lymphoma.
1296. The method of embodiment 1280, wherein the non-Hodgkin's lymphoma is angioimmunoblastic T-cell lymphoma.
1297. The method of embodiment 1280, wherein the non-Hodgkin's lymphoma is cutaneous T-cell lymphoma.
1298. The method of embodiment 1280, wherein the non-Hodgkin's lymphoma is extranodal natural killer/T-cell lymphoma.
1299. The method of embodiment 1280, wherein the non-Hodgkin's lymphoma is enteropathy type intestinal T-cell lymphoma.
1300. The method of embodiment 1280, wherein the non-Hodgkin's lymphoma is precursor T-lymphoblastic lymphoma.
1301. The method of embodiment 1280, wherein the non-Hodgkin's lymphoma is unspecified peripheral T-cell lymphoma.
1302. The method of embodiment 1268, wherein the proliferative disease is a leukemia.
1303. The method of embodiment 1302, wherein the leukemia is B-cell acute lymphoid leukemia (BALL), T-cell acute lymphoid leukemia (TALL), acute lymphoid leukemia (ALL), acute myeloid leukemia (AML), chronic myelogenous leukemia (CML), chronic lymphocytic leukemia (CLL), B-cell chronic lymphocytic leukemia (B-CLL), B-cell prolymphocytic leukemia (B-PLL), hairy cell leukemia, precursor B-lymphoblastic leukemia (PB-LBL), large granular lymphocyte leukemia, precursor T-lymphoblastic leukemia (T-LBL), or T-cell chronic lymphocytic leukemia/prolymphocytic leukemia (T-CLL/PLL).
1304. The method of embodiment 1303, wherein the leukemia is B-cell acute lymphoid leukemia (BALL).
1305. The method of embodiment 1303, wherein the leukemia is T-cell acute lymphoid leukemia (TALL).
1306. The method of embodiment 1303, wherein the leukemia is acute lymphoid leukemia (ALL).
1307. The method of embodiment 1303, wherein the leukemia is acute myeloid leukemia (AML).
1308. The method of embodiment 1303, wherein the leukemia is chronic myelogenous leukemia (CML).
1309. The method of embodiment 1303, wherein the leukemia is chronic lymphocytic leukemia (CLL).
1310. The method of embodiment 1303, wherein the leukemia is B-cell chronic lymphocytic leukemia (B-CLL).
1311. The method of embodiment 1303, wherein the leukemia is B-cell prolymphocytic leukemia (B-PLL).
1312. The method of embodiment 1303, wherein the leukemia is hairy cell leukemia.
1313. The method of embodiment 1303, wherein the leukemia is precursor B-lymphoblastic leukemia (PB-LBL).
1314. The method of embodiment 1303, wherein the leukemia is large granular lymphocyte leukemia.
1315. The method of embodiment 1303, wherein the leukemia is precursor T-lymphoblastic leukemia (T-LBL).
1316. The method of embodiment 1303, wherein the leukemia is T-cell chronic lymphocytic leukemia/prolymphocytic leukemia (T-CLL/PLL).
1317. The method of embodiment 1268, wherein the proliferative disease is multiple myeloma.
1318. The method of embodiment 1268, wherein the proliferative disease is a chronic myeloproliferative neoplasm.
1319. The method of embodiment 1268, wherein the proliferative disease is a macroglobulinemia.
1320. The method of embodiment 1268, wherein the proliferative disease is a myelodysplastic syndrome.
1321. The method of embodiment 1268, wherein the proliferative disease is a myelodysplastic/myeloproliferative neoplasm.
1322. The method of embodiment 1268, wherein the proliferative disease is a plasmacytic dendritic cell neoplasm
1323. The method of embodiment 1265 or 1266, wherein the proliferative disease is adrenocortical carcinoma, anal cancer, appendix cancer, bile duct cancer, bladder cancer, bone cancer, brain cancer, breast cancer, bronchial tumor, carcinoma of unknown primary origin, cervical cancer, a chordoma, colon cancer, colorectal cancer, embryonal tumor, endometrial cancer, ependymoma, esophageal cancer, esthesioneuroblastoma, Ewing sarcoma, eye cancer, malignant fibrous histiocytoma, germ cell tumor, gallbladder cancer, gastric cancer, gastrointestinal carcinoid tumor, gastrointestinal stromal tumor, gestational trophoblastic disease, glioma, head and neck cancer, heart cancer, HER2+ cancer, hypopharyngeal cancer, Kaposi sarcoma, kidney cancer, Langerhans cell histiocytosis, laryngeal cancer, lip and oral cavity cancer, liver cancer, lung cancer, mesothelioma, metastatic squamous neck cancer with occult primary, midline tract carcinoma involving NUT gene, mouth cancer, nasal cavity cancer, nasopharyngeal cancer, neuroblastoma, oropharyngeal cancer, ovarian cancer, pancreatic cancer, para-nasal sinus cancer, paraganglioma, parathyroid cancer, penile cancer, pharyngeal cancer, pituitary cancer, pleuropulmonary blastoma, prostate cancer, rectal cancer, renal cell cancer, renal pelvis and ureter cancer, retinoblastoma, a rhabdoid tumor, salivary gland cancer, skin cancer, small intestine cancer, soft tissue sarcoma, spinal cord tumor, stomach cancer, teratoid tumor, testicular cancer, throat cancer, thymoma, thymic carcinoma, thyroid cancer, urethral cancer, uterine cancer, vaginal cancer, vulvar cancer, or Wilms tumor.
1324. The method of embodiment 1323, wherein the proliferative disease is adrenocortical carcinoma.
1325. The method of embodiment 1323, wherein the proliferative disease is anal cancer.
1326. The method of embodiment 1323, wherein the proliferative disease is appendix cancer.
1327. The method of embodiment 1323, wherein the proliferative disease is bile duct cancer.
1328. The method of embodiment 1323, wherein the proliferative disease is bladder cancer.
1329. The method of embodiment 1323, wherein the proliferative disease is bone cancer.
1330. The method of embodiment 1323, wherein the proliferative disease is brain cancer.
1331. The method of embodiment 1323, wherein the proliferative disease is breast cancer.
1332. The method of embodiment 1323, wherein the proliferative disease is bronchial tumor.
1333. The method of embodiment 1323, wherein the proliferative disease is carcinoma of unknown primary origin.
1334. The method of embodiment 1323, wherein the proliferative disease is cervical cancer.
1335. The method of embodiment 1323, wherein the proliferative disease is a chordoma.
1336. The method of embodiment 1323, wherein the proliferative disease is colon cancer.
1337. The method of embodiment 1323, wherein the proliferative disease is colorectal cancer.
1338. The method of embodiment 1323, wherein the proliferative disease is embryonal tumor.
1339. The method of embodiment 1323, wherein the proliferative disease is endometrial cancer.
1340. The method of embodiment 1323, wherein the proliferative disease is ependymoma.
1341. The method of embodiment 1323, wherein the proliferative disease is esophageal cancer.
1342. The method of embodiment 1323, wherein the proliferative disease is esthesioneuroblastoma.
1343. The method of embodiment 1323, wherein the proliferative disease is Ewing sarcoma.
1344. The method of embodiment 1323, wherein the proliferative disease is eye cancer.
1345. The method of embodiment 1323, wherein the proliferative disease is malignant fibrous histiocytoma.
1346. The method of embodiment 1323, wherein the proliferative disease is germ cell tumor.
1347. The method of embodiment 1323, wherein the proliferative disease is gallbladder cancer.
1348. The method of embodiment 1323, wherein the proliferative disease is gastric cancer.
1349. The method of embodiment 1323, wherein the proliferative disease is gastrointestinal carcinoid tumor.
1350. The method of embodiment 1323, wherein the proliferative disease is gastrointestinal stromal tumor.
1351. The method of embodiment 1323, wherein the proliferative disease is gestational trophoblastic disease.
1352. The method of embodiment 1323, wherein the proliferative disease is glioma.
1353. The method of embodiment 1323, wherein the proliferative disease is head and neck cancer.
1354. The method of embodiment 1323, wherein the proliferative disease is heart cancer.
1355. The method of embodiment 1323, wherein the proliferative disease is HER2+ cancer.
1356. The method of embodiment 1323, wherein the proliferative disease is hypopharyngeal cancer.
1357. The method of embodiment 1323, wherein the proliferative disease is Kaposi sarcoma.
1358. The method of embodiment 1323, wherein the proliferative disease is kidney cancer.
1359. The method of embodiment 1323, wherein the proliferative disease is Langerhans cell histiocytosis.
1360. The method of embodiment 1323, wherein the proliferative disease is laryngeal cancer.
1361. The method of embodiment 1323, wherein the proliferative disease is lip and oral cavity cancer.
1362. The method of embodiment 1323, wherein the proliferative disease is liver cancer.
1363. The method of embodiment 1323, wherein the proliferative disease is lung cancer.
1364. The method of embodiment 1323, wherein the proliferative disease is mesothelioma.
1365. The method of embodiment 1323, wherein the proliferative disease is metastatic squamous neck cancer with occult primary.
1366. The method of embodiment 1323, wherein the proliferative disease is midline tract carcinoma involving NUT gene.
1367. The method of embodiment 1323, wherein the proliferative disease is mouth cancer.
1368. The method of embodiment 1323, wherein the proliferative disease is nasal cavity cancer.
1369. The method of embodiment 1323, wherein the proliferative disease is nasopharyngeal cancer.
1370. The method of embodiment 1323, wherein the proliferative disease is neuroblastoma.
1371. The method of embodiment 1323, wherein the proliferative disease is oropharyngeal cancer.
1372. The method of embodiment 1323, wherein the proliferative disease is ovarian cancer.
1373. The method of embodiment 1323, wherein the proliferative disease is pancreatic cancer.
1374. The method of embodiment 1323, wherein the proliferative disease is para-nasal sinus cancer.
1375. The method of embodiment 1323, wherein the proliferative disease is paraganglioma.
1376. The method of embodiment 1323, wherein the proliferative disease is parathyroid cancer.
1377. The method of embodiment 1323, wherein the proliferative disease is penile cancer.
1378. The method of embodiment 1323, wherein the proliferative disease is pharyngeal cancer.
1379. The method of embodiment 1323, wherein the proliferative disease is pituitary cancer.
1380. The method of embodiment 1323, wherein the proliferative disease is pleuropulmonary blastoma.
1381. The method of embodiment 1323, wherein the proliferative disease is prostate cancer.
1382. The method of embodiment 1323, wherein the proliferative disease is rectal cancer.
1383. The method of embodiment 1323, wherein the proliferative disease is renal cell cancer.
1384. The method of embodiment 1323, wherein the proliferative disease is renal pelvis and ureter cancer.
1385. The method of embodiment 1323, wherein the proliferative disease is retinoblastoma.
1386. The method of embodiment 1323, wherein the proliferative disease is a rhabdoid tumor.
1387. The method of embodiment 1323, wherein the proliferative disease is salivary gland cancer.
1388. The method of embodiment 1323, wherein the proliferative disease is skin cancer.
1389. The method of embodiment 1323, wherein the proliferative disease is small intestine cancer.
1390. The method of embodiment 1323, wherein the proliferative disease is soft tissue sarcoma.
1391. The method of embodiment 1323, wherein the proliferative disease is spinal cord tumor.
1392. The method of embodiment 1323, wherein the proliferative disease is stomach cancer.
1393. The method of embodiment 1323, wherein the proliferative disease is teratoid tumor.
1394. The method of embodiment 1323, wherein the proliferative disease is testicular cancer.
1395. The method of embodiment 1323, wherein the proliferative disease is throat cancer.
1396. The method of embodiment 1323, wherein the proliferative disease is thymoma.
1397. The method of embodiment 1323, wherein the proliferative disease is thymic carcinoma.
1398. The method of embodiment 1323, wherein the proliferative disease is thyroid cancer.
1399. The method of embodiment 1323, wherein the proliferative disease is urethral cancer.
1400. The method of embodiment 1323, wherein the proliferative disease is uterine cancer.
1401. The method of embodiment 1323, wherein the proliferative disease is vaginal cancer.
1402. The method of embodiment 1323, wherein the proliferative disease is vulvar cancer.
1403. The method of embodiment 1323, wherein the proliferative disease is Wilms tumor.
1404. The method of embodiment 1264, wherein the subject has an autoimmune disorder.
1405. The method of embodiment 1404, wherein the autoimmune disorder is systemic lupus erythematosus (SLE), Sjögren's syndrome, scleroderma, rheumatoid arthritis (RA), juvenile idiopathic arthritis, graft versus host disease, dermatomyositis, type I diabetes mellitus, Hashimoto's thyroiditis, Graves's disease, Addison's disease, celiac disease, Crohn's Disease, pernicious anaemia, pemphigus vulgaris, vitiligo, autoimmune haemolytic anaemia, idiopathic thrombocytopenic purpura, giant cell arteritis, myasthenia gravis, multiple sclerosis (MS) (e.g., relapsing-remitting MS (RRMS)), glomerulonephritis, Goodpasture's syndrome, bullous pemphigoid, colitis ulcerosa, Guillain-Barré syndrome, chronic inflammatory demyelinating polyneuropathy, anti-phospholipid syndrome, narcolepsy, sarcoidosis, or Wegener's granulomatosis.
1406. The method of embodiment 1405, wherein the autoimmune disorder is systemic lupus erythematosus (SLE).
1407. The method of embodiment 1405, wherein the autoimmune disorder is Sjögren's syndrome.
1408. The method of embodiment 1405, wherein the autoimmune disorder is scleroderma.
1409. The method of embodiment 1405, wherein the autoimmune disorder is rheumatoid arthritis (RA).
1410. The method of embodiment 1405, wherein the autoimmune disorder is juvenile idiopathic arthritis.
1411. The method of embodiment 1405, wherein the autoimmune disorder is graft versus host disease.
1412. The method of embodiment 1405, wherein the autoimmune disorder is dermatomyositis.
1413. The method of embodiment 1405, wherein the autoimmune disorder is type I diabetes mellitus.
1414. The method of embodiment 1405, wherein the autoimmune disorder is Hashimoto's thyroiditis.
1415. The method of embodiment 1405, wherein the autoimmune disorder is Graves's disease.
1416. The method of embodiment 1405, wherein the autoimmune disorder is Addison's disease.
1417. The method of embodiment 1405, wherein the autoimmune disorder is celiac disease.
1418. The method of embodiment 1405, wherein the autoimmune disorder is Crohn's Disease.
1419. The method of embodiment 1405, wherein the autoimmune disorder is pernicious anaemia.
1420. The method of embodiment 1405, wherein the autoimmune disorder is pemphigus vulgaris.
1421. The method of embodiment 1405, wherein the autoimmune disorder is vitiligo.
1422. The method of embodiment 1405, wherein the autoimmune disorder is autoimmune haemolytic anaemia.
1423. The method of embodiment 1405, wherein the autoimmune disorder is idiopathic thrombocytopenic purpura.
1424. The method of embodiment 1405, wherein the autoimmune disorder is giant cell arteritis.
1425. The method of embodiment 1405, wherein the autoimmune disorder is myasthenia gravis.
1426. The method of embodiment 1405, wherein the autoimmune disorder is multiple sclerosis (MS).
1427. The method of embodiment 1426, wherein the autoimmune disorder is relapsing-remitting MS (RRMS).
1428. The method of embodiment 1405, wherein the autoimmune disorder is glomerulonephritis.
1429. The method of embodiment 1405, wherein the autoimmune disorder is Goodpasture's syndrome.
1430. The method of embodiment 1405, wherein the autoimmune disorder is bullous pemphigoid.
1431. The method of embodiment 1405, wherein the autoimmune disorder is colitis ulcerosa.
1432. The method of embodiment 1405, wherein the autoimmune disorder is Guillain-Barré syndrome.
1433. The method of embodiment 1405, wherein the autoimmune disorder is chronic inflammatory demyelinating polyneuropathy.
1434. The method of embodiment 1405, wherein the autoimmune disorder is anti-phospholipid syndrome.
1435. The method of embodiment 1405, wherein the autoimmune disorder is narcolepsy.
1436. The method of embodiment 1405, wherein the autoimmune disorder is sarcoidosis.
1437. The method of embodiment 1405, wherein the autoimmune disorder is Wegener's granulomatosis.
1438. The method of any one of embodiments 1264 to 1437, further comprising administering at least one additional agent to the subject.
1439. A nucleic acid or plurality of nucleic acids encoding the CD3 binding molecule of any one of embodiments 1 to 1224.
1440. A cell engineered to express the CD3 binding molecule of any one of embodiments 1 to 1224.
1441. A cell transfected with one or more expression vectors comprising one or more nucleic acid sequences encoding the CD3 binding molecule of any one of embodiments 1 to 1224 under the control of one or more promoters.
1442. A method of producing a CD3 binding molecule, comprising:

[0906] (a) culturing the cell of embodiment 1440 or embodiment 1441 in conditions under which the CD3 binding molecule is expressed; and
[0907] (b) recovering the CD3 binding molecule from the cell culture.

### 9.2. Numbered Embodiments 1′ to 53′

[0908] 1′. A multspecific binding molecule (MBM), comprising:
(a) at least one antigen-binding module 1 (ABM1) that binds specifically to human CD3; and
(b) at least one antigen-binding module 2 (ABM2) that binds specifically to specifically to a human tumor-associated antigen (TAA);
wherein each ABM is capable of binding its respective target at the same time as each of the other antigen-binding modules is bound to its respective target.
2′. The MBM of embodiment 1′, wherein ABM1 is:
(a) an immunoglobulin scaffold-based ABM which is optionally an anti-CD3 antibody, an antibody fragment, an scFv, a dsFv, a Fv, a Fab, an scFab, a (Fab′)2, a single domain antibody (SDAB), a VH or VL domain, or a camelid VHH domain; or
(b) a non-immunoglobulin scaffold-based ABM which is optionally a Kunitz domain, an Adnexin, an Affibody, a DARPin, an Avimer, an Anticalin, a Lipocalin, a Centyrin, a Versabody, a Knottin, an Adnectin, a Pronectin, an Affitin/Nanofitin, an Affilin, an Atrimer/Tetranectin, a bicyclic peptide, a cys-knot, a Fn3 scaffold, an Obody, a Tn3, an Aan Affimer, BD, an Adhiron, a Duocalin, an Alphabody, an Armadillo Repeat Protein, a Repebody, or a Fynomer.
3′. The MBM of embodiment 2′, wherein ABM1 is a scFv.
4′. The MBM of embodiment 2′, wherein ABM1 is a Fab.
5′. The MBM of embodiment 4′, wherein the Fab is a Fab heterodimer.
6′. The MBM of any one of embodiments 2′ to 5′, wherein ABM1 comprises any of the binding sequences set forth in Table 19.
7′. The MBM of any one of embodiments 1′ to 5′, wherein ABM1 comprises: (i) a heavy chain variable region that comprises (a) a HCDR1 (CDR-Complementarity Determining Region) of SEQ ID NO: 136, (b) a HCDR2 of SEQ ID NO:137, (c) a HCDR3 of SEQ ID NO: 138 and a light chain variable region that comprises: (d) a LCDR1 of SEQ ID NO: 152, (e) a LCDR2 of SEQ ID NO: 153, and (f) a LCDR3 of SEQ ID NO: 154;
(ii) a heavy chain variable region that comprises (a) a HCDR1 of SEQ ID NO: 168, (b) a HCDR2 of SEQ ID NO: 169, (c) a HCDR3 of SEQ ID NO: 170; and a light chain variable region that comprises: (d) a LCDR1 of SEQ ID NO: 184, (e) a LCDR2 of SEQ ID NO: 185, and (f) a LCDR3 of SEQ ID NO: 186;
(iii) a heavy chain variable region that comprises (a) a HCDR1 of SEQ ID NO: 200, (b) a HCDR2 of SEQ ID NO: 201, (c) a HCDR3 of SEQ ID NO: 202; and a light chain variable region that comprises: (d) a LCDR1 of SEQ ID NO: 216, (e) a LCDR2 of SEQ ID NO: 217, and (f) a LCDR3 of SEQ ID NO: 218;
(iv) a heavy chain variable region that comprises: (a) a HCDR1 of SEQ ID NO: 232, (b) a HCDR2 of SEQ ID NO: 233, (c) a HCDR3 of SEQ ID NO: 234; and a light chain variable region that comprises: (d) a LCDR1 of SEQ ID NO: 248, (e) a LCDR2 of SEQ ID NO: 249, and (f) a LCDR3 of SEQ ID NO: 250;
(v) a heavy chain variable region that comprises: (a) a HCDR1 of SEQ ID NO: 264, (b) a HCDR2 of SEQ ID NO: 265, (c) a HCDR3 of SEQ ID NO: 266; and a light chain variable region that comprises: (d) a LCDR1 of SEQ ID NO: 280, (e) a LCDR2 of SEQ ID NO: 281, and (f) a LCDR3 of SEQ ID NO: 282;
(vi) a heavy chain variable region that comprises: (a) a HCDR1 of SEQ ID NO: 296, (b) a HCDR2 of SEQ ID NO: 297, (c) a HCDR3 of SEQ ID NO: 298; and a light chain variable region that comprises: (d) a LCDR1 of SEQ ID NO: 312, (e) a LCDR2 of SEQ ID NO: 313, and (f) a LCDR3 of SEQ ID NO: 314;
(vii) a heavy chain variable region that comprises: (a) a HCDR1 of SEQ ID NO: 328, (b) a HCDR2 of SEQ ID NO: 329, (c) a HCDR3 of SEQ ID NO: 330; and a light chain variable region that comprises: (d) a LCDR1 of SEQ ID NO: 344, (e) a LCDR2 of SEQ ID NO: 345, and (f) a LCDR3 of SEQ ID NO: 346;
(viii) a heavy chain variable region that comprises: (a) a HCDR1 of SEQ ID NO: 360, (b) a HCDR2 of SEQ ID NO: 361, (c) a HCDR3 of SEQ ID NO: 362; and a light chain variable region that comprises: (d) a LCDR1 of SEQ ID NO: 376, (e) a LCDR2 of SEQ ID NO: 377, and (f) a LCDR3 of SEQ ID NO: 378;
(ix) a heavy chain variable region that comprises: (a) a HCDR1 of SEQ ID NO: 392, (b) a HCDR2 of SEQ ID NO: 393, (c) a HCDR3 of SEQ ID NO: 394; and a light chain variable region that comprises: (d) a LCDR1 of SEQ ID NO: 408, (e) a LCDR2 of SEQ ID NO:409, and (f) a LCDR3 of SEQ ID NO:410; or
(x) a heavy chain variable region that comprises: (a) a HCDR1 of SEQ ID NO: 424, (b) a HCDR2 of SEQ ID NO: 425, (c) a HCDR3 of SEQ ID NO: 426; and a light chain variable region that comprises: (d) a LCDR1 of SEQ ID NO: 440, (e) a LCDR2 of SEQ ID NO: 441, and (f) a LCDR3 of SEQ ID NO:442.
8′. The MBM of any one of embodiments 1′ to 5′, wherein ABM1 comprises:
(i) a heavy chain variable region (vH) that comprises SEQ ID NO: 145, and a light chain variable region (vL) that comprises SEQ ID NO:161;
(ii) a heavy chain variable region (vH) that comprises SEQ ID NO: 177, and a light chain variable region (vL) that comprises SEQ ID NO: 193;
(iii) a heavy chain variable region (vH) that comprises SEQ ID NO: 209, and a light chain variable region (vL) that comprises SEQ ID NO: 225;
(iv) a heavy chain variable region (vH) that comprises SEQ ID NO: 241, and a light chain variable region (vL) that comprises SEQ ID NO: 257;
(v) a heavy chain variable region (vH) that comprises SEQ ID NO: 273, and a light chain variable region (vL) that comprises SEQ ID NO: 289;
(vi) a heavy chain variable region (vH) that comprises SEQ ID NO: 305, and a light chain variable region (vL) that comprises SEQ ID NO: 321;
(vii) a heavy chain variable region (vH) that comprises SEQ ID NO: 337, and a light chain variable region (vL) that comprises SEQ ID NO: 353;
(viii) a heavy chain variable region (vH) that comprises SEQ ID NO: 369, and a light chain variable region (vL) that comprises SEQ ID NO: 385;
(ix) a heavy chain variable region (vH) that comprises SEQ ID NO: 401, and a light chain variable region (vL) that comprises SEQ ID NO: 417; or
(x) a heavy chain variable region (vH) that comprises SEQ ID NO: 433, and a light chain variable region (vL) that comprises SEQ ID NO: 449.
9′. The MBM of embodiment 8′, that retains at least 90, 91, 92, 93, 94, 95, 96, 97, 98 or 99% identity over either the variable light or variable heavy region.
10′. The MBM of embodiment 1′, wherein ABM2 is:
(a) an immunoglobulin scaffold-based ABM which is an anti-TAA antibody, an antibody fragment, an scFv, a dsFv, a Fv, a Fab, an scFab, a (Fab′)2, a single domain antibody (SDAB), a VH or VL domain, or a camelid VHH domain; or
(b) a non-immunoglobulin scaffold-based ABM which is optionally a Kunitz domain, an Adnexin, an Affibody, a DARPin, an Avimer, an Anticalin, a Lipocalin, a Centyrin, a Versabody, a Knottin, an Adnectin, a Pronectin, an Affitin/Nanofitin, an Affilin, an Atrimer/Tetranectin, a bicyclic peptide, a cys-knot, a Fn3 scaffold, an Obody, a Tn3, an Aan Affimer, BD, an Adhiron, a Duocalin, an Alphabody, an Armadillo Repeat Protein, a Repebody, or a Fynomer.
11′. The MBM of embodiment 10, wherein the TAA is TSHR, CD171, CS-1, CLL-1, GD3, Tn Ag, FLT3, CD38, CD44v6, B7H3, KIT, IL-13Ra2, IL-11Ra, PSCA, PRSS21, VEGFR2, LewisY, CD24, PDGFR-beta, SSEA-4, MUC1, EGFR, EGFRvIII, NCAM, CAIX, LMP2, EphA2, fucosyl GM1, sLe, GM3, TGS5, HMWMAA, o-acetyl-GD2, GD2, folate receptor alpha, folate receptor beta, TEM1/CD248, TEM7R, CLDN6, GPRC5D, CXORF61, CD97, CD179a, ALK, polysialic acid, PLAC1, GloboH, NY-BR-1, UPK2, HAVCR1, ADRB3, PANX3, GPR20, LY6K, OR51E2, TAARP, WT1, ETV6-AML, sperm protein 17, XAGE1, Tie 2, MAD-CT-1, MAD-CT-2, Fos-related antigen 1, p53 mutant, hTERT, sarcoma translocation breakpoints, ML-IAP, ERG (TMPRSS2 ETS fusion gene), NA17, PAX3, Androgen receptor, Cyclin B1, MYCN, RhoC, CYP1B1, BORIS, SART3, PAX5, OY-TES1, LCK, AKAP-4, SSX2, CD79a, CD79b, CD72, LAIR1, FCAR, LILRA2, CD300LF, CLEC12A, BST2, EMR2, LY75, GPC3, FCRL5, IGLL1, CD19, CD20, CD30, ERBB2, ROR1, FLT3, TAAG72, CD22, CD33, GD2, BCMA, gp100Tn, FAP, tyrosinase, EPCAM, CEA, Igf-I receptor, Cadherin17, CD32b, GPNMB, GPR64, HER3, LRP6, LYPD8, NKG2D, SLC34A2, SLC39A6, SLITRK6, TACSTD2, or EphB2.
12′. The MBM of embodiment 10′, wherein ABM2 comprises the CDRs or variable region sequences of the antibodies set forth in Table 15A.
13′. The MBM of embodiments 10′ or 11′, wherein the TAA is BCMA.
14′. The MBM of embodiments 10′ or 11′, wherein the TAA is CD19.
15′. The MBM of embodiment 14′, wherein ABM2 comprises any of the binding sequences set forth Table 17.
16′. The MBM of any one of embodiments 10′ to 15′, wherein wherein ABM2 is an scFv.
17′. The MBM of any one of embodiments 10′ to 15′, wherein ABM2 is a Fab.
18′. The MBM of embodiment 17′, wherein the Fab is a Fab heterodimer.
19′. The MBM of any one of embodiments 1′ to 18′, which comprises an Fc domain.
20′. The MBM of embodiment 19′, wherein the Fc domain is an Fc heterodimer.
21′. The MBM of embodiment 20′, wherein the Fc heterodimer comprises any of the Fc modifications set forth in Table 4.
22′. The MBM of any one of embodiments 19′ to 21′, wherein the Fc domain has altered effector function.
23′. The MBM of embodiment 22′, wherein the Fc domain has altered binding to one or more Fc receptors.
24′. The MBM of embodiment 23′, wherein the one or more Fc receptors comprise FcRN.
25′. The MBM of embodiment 23′, wherein the one or more Fc receptors comprise leukocyte receptors.
26′. The MBM of any one of embodiments 19′ to 25′, wherein the Fc has modified disulfide bond architecture.
27′. The MBM of any one of embodiments 19′ to 26′, wherein the Fc has altered glycosylation patterns.
28′. The MBM of any one of embodiments 19′ to 27′, wherein the Fc comprises a hinge region.
29′. The MBM of embodiment 28′ wherein the hinge region is set forth in Table 7.
30′. The MBM of any one of embodiments 1′ to 29′, which comprises at least one scFv domain.
31′. The MBM of embodiment 30′, wherein at least one scFv comprises a linker connecting the VH and VL domains.
32′. The MBM of embodiment 31′, wherein the linker is 5 to 25 amino acids in length.
33′. The MBM of embodiment 32′, wherein the linker is 12 to 20 amino acids in length.
34′. The MBM of any one of embodiments 31′ to 33′, wherein the linker is a charged linker and/or a flexible linker.
35′. The MBM of any one of embodiments 31′ to 34′, wherein the linker is selected from any one of linkers L1 through L54 (SEQ ID NO:25-78)
36′. The MBM of any one of embodiments 1′ to 29′, which comprises at least one Fab domain.
37′. The MBM of embodiment 36′, wherein at least one Fab domain comprises any of the Fab heterodimerization modifications set forth in Table 2.
38′. A multspecific binding molecule (MBM), comprising:
(a) at least one antigen-binding module 1 (ABM1) that binds specifically to human CD3;
(b) at least one antigen-binding module 2 (ABM2) that binds specifically to a human tumor-associated antigen (TAA); and
(c) at least one antigen binding module 3 (ABM3) that bind specifically to an immunoglobulin scaffold-based ABM which is an anti-CD2 antibody, an antibody fragment, an scFv, a dsFv, a Fv, a Fab, an scFab, a (Fab′)2, a single domain antibody (SDAB), a VH or VL domain, or a camelid VHH domain or a non-immunoglobulin scaffold-based ABM which is optionally a Kunitz domain, an Adnexin, an Affibody, a DARPin, an Avimer, an Anticalin, a Lipocalin, a Centyrin, a Versabody, a Knottin, an Adnectin, a Pronectin, an Affitin/Nanofitin, an Affilin, an Atrimer/Tetranectin, a bicyclic peptide, a cys-knot, a Fn3 scaffold, an Obody, a Tn3, an Aan Affimer, BD, an Adhiron, a Duocalin, an Alphabody, an Armadillo Repeat Protein, a Repebody, or a Fynomer.
39′. The MBM of embodiment 38′, wherein ABM3 comprises any of the binding sequences set forth in Table 13 or Table 14.
40′. The MBM of embodiment 39′, wherein ABM3 is a scFv.
41′. The MBM of embodiment 39′, wherein ABM3 is a Fab.
42′. A conjugate comprising the MBM of any one of embodiments 1′ to 41′ and a cytotoxic or cytostatic agent.
43′. The conjugate of embodiment 42′, wherein the cytotoxic or cytostatic agent is conjugated to the MBM via a linker.
44′. A pharmaceutical composition comprising the MBM of any one of embodiments 1′ to 41′ or the conjugate of embodiment 42′ or embodiment 43′ and an excipient.
45′. A method of treating a subject with cancer, comprising administering to a subject suffering from cancer an effective amount of the MBM of any one of embodiments 1′ to 41′, the conjugate of embodiment 42′ or embodiment 43′, or the pharmaceutical composition of embodiment 44′.
46′. The method of embodiment 45′, wherein the cancer is selected from HER2+ cancer, acute lymphoblastic leukemia (ALL), acute myeloid leukemia (AML), adrenocortical carcinoma, anal cancer, appendix cancer, astrocytoma, basal cell carcinoma, brain tumor, bile duct cancer, bladder cancer, bone cancer, breast cancer, bronchial tumor, Burkitt Lymphoma, carcinoma of unknown primary origin, cardiac tumor, cervical cancer, chordoma, chronic lymphocytic leukemia (CLL), chronic myelogenous leukemia (CML), chronic myeloproliferative neoplasm, colon cancer, colorectal cancer, craniopharyngioma, cutaneous T-cell lymphoma, ductal carcinoma, embryonal tumor, endometrial cancer, ependymoma, esophageal cancer, esthesioneuroblastoma, fibrous histiocytoma, Ewing sarcoma, eye cancer, germ cell tumor, gallbladder cancer, gastric cancer, gastrointestinal carcinoid tumor, gastrointestinal stromal tumor, gestational trophoblastic disease, glioma, head and neck cancer, hairy cell leukemia, hepatocellular cancer, histiocytosis, Hodgkin lymphoma, hypopharyngeal cancer, intraocular melanoma, islet cell tumor, Kaposi sarcoma, kidney cancer, Langerhans cell histiocytosis, laryngeal cancer, leukemia, lip and oral cavity cancer, liver cancer, lobular carcinoma in situ, lung cancer, lymphoma, macroglobulinemia, malignant fibrous histiocytoma, melanoma, Merkel cell carcinoma, mesothelioma, metastatic squamous neck cancer with occult primary, midline tract carcinoma involving NUT gene, mouth cancer, multiple endocrine neoplasia syndrome, multiple myeloma, mycosis fungoides, myelodysplastic syndrome, myelodysplastic/myeloproliferative neoplasm, nasal cavity and para-nasal sinus cancer, nasopharyngeal cancer, neuroblastoma, non-Hodgkin lymphoma, non-small cell lung cancer, oropharyngeal cancer, osteosarcoma, ovarian cancer, pancreatic cancer, papillomatosis, paraganglioma, parathyroid cancer, penile cancer, pharyngeal cancer, pheochromocytomas, pituitary tumor, pleuropulmonary blastoma, primary central nervous system lymphoma, prostate cancer, rectal cancer, renal cell cancer, renal pelvis and ureter cancer, retinoblastoma, rhabdoid tumor, salivary gland cancer, Sezary syndrome, skin cancer, small cell lung cancer, small intestine cancer, soft tissue sarcoma, spinal cord tumor, stomach cancer, T-cell lymphoma, teratoid tumor, testicular cancer, throat cancer, thymoma and thymic carcinoma, thyroid cancer, urethral cancer, uterine cancer, vaginal cancer, vulvar cancer, and Wilms tumor.
47′. The method of 46′, further comprising administering at least one additional agent to the subject.
48′. A nucleic acid or plurality of nucleic acids encoding the MBM of any one of embodiments 1′ to 41′.
49′. A cell engineered to comprise a nucleic acid or plurality of nucleic acids encoding the MBM of any one of embodiments 1′ to 41′.
50′. The cell of embodiment 49′ transfected with one or more expression vectors comprising one or more nucleic acid sequences encoding the MBM under the control of one or more promoters.
51′. The cell of embodiment 50′, wherein the one or more promoters comprises an inducible promoter.
52′. The cell of any one of embodiments 49′ to 51′, wherein the MBM is produced in secretable form.
53′. A method of producing a MBM, comprising:
(a) culturing the cell of any one of embodiments 49′ to 51′ in conditions under which the MBM is expressed; and
(b) recovering the MBM from the cell culture.

The application's sequence listing, which the Patent Office published only in electronic form, follows.

SEQUENCE LISTING (1113 sequences)

SEQ ID NO: 1 - protein, 19 aa, Homo sapiens
VPSTPPTPSPSTPPTPSPS

SEQ ID NO: 2 - protein, 6 aa, Homo sapiens
VPPPPP

SEQ ID NO: 3 - protein, 58 aa, Homo sapiens
ESPKAQASSVPTAQPQAEGSLAKATTAPATTRNTGRGGEEKKKEKEKEEQEERETKTP

SEQ ID NO: 4 - protein, 15 aa, Homo sapiens
EPKSCDKTHTCPPCP

SEQ ID NO: 5 - protein, 12 aa, Homo sapiens
ERKCCVECPPCP

SEQ ID NO: 6 - protein, 62 aa, Homo sapiens
ELKTPLGDTTHTCPRCPEPKSCDTPPPCPRCPEPKSCDTPPPCPRCPEPKSCDTPPPCPRCP

SEQ ID NO: 7 - protein, 12 aa, Homo sapiens
ESKYGPPCPSCP

SEQ ID NO: 8 - protein, 12 aa, Homo sapiens
ESKYGPPCPPCP

SEQ ID NO: 9 - protein, 4 aa, Artificial Sequence
  Description of Artificial Sequence: Synthetic peptide
CPPC

SEQ ID NO: 10 - protein, 4 aa, Artificial Sequence
  Description of Artificial Sequence: Synthetic peptide
CPSC

SEQ ID NO: 11 - protein, 4 aa, Artificial Sequence
  Description of Artificial Sequence: Synthetic peptide
CPRC

SEQ ID NO: 12 - protein, 4 aa, Artificial Sequence
  Description of Artificial Sequence: Synthetic peptide
SPPC

SEQ ID NO: 13 - protein, 4 aa, Artificial Sequence
  Description of Artificial Sequence: Synthetic peptide
CPPS

SEQ ID NO: 14 - protein, 4 aa, Artificial Sequence
  Description of Artificial Sequence: Synthetic peptide
SPPS

SEQ ID NO: 15 - protein, 8 aa, Artificial Sequence
  Description of Artificial Sequence: Synthetic peptide
DKTHTCAA

SEQ ID NO: 16 - protein, 11 aa, Artificial Sequence
  Description of Artificial Sequence: Synthetic peptide
DKTHTCPPCPA

SEQ ID NO: 17 - protein, 18 aa, Artificial Sequence
  Description of Artificial Sequence: Synthetic peptide
DKTHTCPPCPATCPPCPA

SEQ ID NO: 18 - protein, 25 aa, Artificial Sequence
  Description of Artificial Sequence: Synthetic peptide
DKTHTCPPCPATCPPCPATCPPCPA

SEQ ID NO: 19 - protein, 30 aa, Artificial Sequence
  Description of Artificial Sequence: Synthetic polypeptide
DKTHTCPPCPAGKPTLYNSLVMSDTAGTCY

SEQ ID NO: 20 - protein, 31 aa, Artificial Sequence
  Description of Artificial Sequence: Synthetic polypeptide
DKTHTCPPCPAGKPTHVNVSVVMAEVDGTCY

SEQ ID NO: 21 - protein, 15 aa, Artificial Sequence
  Description of Artificial Sequence: Synthetic peptide
DKTHTCCVECPPCPA

SEQ ID NO: 22 - protein, 26 aa, Artificial Sequence
  Description of Artificial Sequence: Synthetic peptide
DKTHTCPRCPEPKSCDTPPPCPRCPA

SEQ ID NO: 23 - protein, 11 aa, Artificial Sequence
  Description of Artificial Sequence: Synthetic peptide
DKTHTCPSCPA

SEQ ID NO: 24 - protein, 5 aa, Artificial Sequence
  Description of Artificial Sequence: Synthetic peptide
GGGGS

SEQ ID NO: 25 - protein, 5 aa, Artificial Sequence
  Description of Artificial Sequence: Synthetic peptide
ADAAP

SEQ ID NO: 26 - protein, 11 aa, Artificial Sequence
  Description of Artificial Sequence: Synthetic peptide
ADAAPTVSIFP

SEQ ID NO: 27 - protein, 12 aa, Artificial Sequence
  Description of Artificial Sequence: Synthetic peptide
ADAAPTVSIFPP

SEQ ID NO: 28 - protein, 6 aa, Artificial Sequence
  Description of Artificial Sequence: Synthetic peptide
AKTTAP

SEQ ID NO: 29 - protein, 13 aa, Artificial Sequence
  Description of Artificial Sequence: Synthetic peptide
AKTTAPSVYPLAP

SEQ ID NO: 30 - protein, 17 aa, Artificial Sequence
  Description of Artificial Sequence: Synthetic peptide
AKTTPKLEEGEFSEARV

SEQ ID NO: 31 - protein, 9 aa, Artificial Sequence
  Description of Artificial Sequence: Synthetic peptide
AKTTPKLGG

SEQ ID NO: 32 - protein, 6 aa, Artificial Sequence
  Description of Artificial Sequence: Synthetic peptide
AKTTPP

SEQ ID NO: 33 - protein, 13 aa, Artificial Sequence
  Description of Artificial Sequence: Synthetic peptide
AKTTPPSVTPLAP

SEQ ID NO: 34 - protein, 6 aa, Artificial Sequence
  Description of Artificial Sequence: Synthetic peptide
ASTKGP

SEQ ID NO: 35 - protein, 13 aa, Artificial Sequence
  Description of Artificial Sequence: Synthetic peptide
ASTKGPSVFPLAP

SEQ ID NO: 36 - protein, 26 aa, Artificial Sequence
  Description of Artificial Sequence: Synthetic peptide
ASTKGPSVFPLAPASTKGPSVFPLAP

SEQ ID NO: 37 - protein, 14 aa, Artificial Sequence
  Description of Artificial Sequence: Synthetic peptide
EGKSSGSGSESKST

SEQ ID NO: 38 - protein, 15 aa, Artificial Sequence
  Description of Artificial Sequence: Synthetic peptide
GEGESGEGESGEGES

SEQ ID NO: 39 - protein, 20 aa, Artificial Sequence
  Description of Artificial Sequence: Synthetic peptide
GEGESGEGESGEGESGEGES

SEQ ID NO: 40 - protein, 15 aa, Artificial Sequence
  Description of Artificial Sequence: Synthetic peptide
GEGGSGEGGSGEGGS

SEQ ID NO: 41 - protein, 15 aa, Artificial Sequence
  Description of Artificial Sequence: Synthetic peptide
GENKVEYAPALMALS

SEQ ID NO: 42 - protein, 15 aa, Artificial Sequence
  Description of Artificial Sequence: Synthetic peptide
GGEGSGGEGSGGEGS

SEQ ID NO: 43 - protein, 15 aa, Artificial Sequence
  Description of Artificial Sequence: Synthetic peptide
GGGESGGEGSGEGGS

SEQ ID NO: 44 - protein, 15 aa, Artificial Sequence
  Description of Artificial Sequence: Synthetic peptide
GGGESGGGESGGGES

SEQ ID NO: 45 - protein, 5 aa, Artificial Sequence
  Description of Artificial Sequence: Synthetic peptide
GGGGS

SEQ ID NO: 46 - protein, 10 aa, Artificial Sequence
  Description of Artificial Sequence: Synthetic peptide
GGGGSGGGGS

SEQ ID NO: 47 - protein, 15 aa, Artificial Sequence
  Description of Artificial Sequence: Synthetic peptide
GGGGSGGGGSGGGGS

SEQ ID NO: 48 - protein, 20 aa, Artificial Sequence
  Description of Artificial Sequence: Synthetic peptide
GGGGSGGGGSGGGGSGGGGS

SEQ ID NO: 49 - protein, 15 aa, Artificial Sequence
  Description of Artificial Sequence: Synthetic peptide
GGGKSGGGKSGGGKS

SEQ ID NO: 50 - protein, 15 aa, Artificial Sequence
  Description of Artificial Sequence: Synthetic peptide
GGGKSGGKGSGKGGS

SEQ ID NO: 51 - protein, 15 aa, Artificial Sequence
  Description of Artificial Sequence: Synthetic peptide
GGKGSGGKGSGGKGS

SEQ ID NO: 52 - protein, 5 aa, Artificial Sequence
  Description of Artificial Sequence: Synthetic peptide
GGSGG

SEQ ID NO: 53 - protein, 9 aa, Artificial Sequence
  Description of Artificial Sequence: Synthetic peptide
GGSGGGGSG

SEQ ID NO: 54 - protein, 13 aa, Artificial Sequence
  Description of Artificial Sequence: Synthetic peptide
GGSGGGGSGGGGS

SEQ ID NO: 55 - protein, 15 aa, Artificial Sequence
  Description of Artificial Sequence: Synthetic peptide
GHEAAAVMQVQYPAS

SEQ ID NO: 56 - protein, 15 aa, Artificial Sequence
  Description of Artificial Sequence: Synthetic peptide
GKGGSGKGGSGKGGS

SEQ ID NO: 57 - protein, 15 aa, Artificial Sequence
  Description of Artificial Sequence: Synthetic peptide
GKGKSGKGKSGKGKS

SEQ ID NO: 58 - protein, 20 aa, Artificial Sequence
  Description of Artificial Sequence: Synthetic peptide
GKGKSGKGKSGKGKSGKGKS

SEQ ID NO: 59 - protein, 15 aa, Artificial Sequence
  Description of Artificial Sequence: Synthetic peptide
GKPGSGKPGSGKPGS

SEQ ID NO: 60 - protein, 20 aa, Artificial Sequence
  Description of Artificial Sequence: Synthetic peptide
GKPGSGKPGSGKPGSGKPGS

SEQ ID NO: 61 - protein, 15 aa, Artificial Sequence
  Description of Artificial Sequence: Synthetic peptide
GPAKELTPLKEAKVS

SEQ ID NO: 62 - protein, 12 aa, Artificial Sequence
  Description of Artificial Sequence: Synthetic peptide
GSAGSAAGSGEF

SEQ ID NO: 63 - protein, 14 aa, Artificial Sequence
  Description of Artificial Sequence: Synthetic peptide
IRPRAIGGSKPRVA

SEQ ID NO: 64 - protein, 18 aa, Artificial Sequence
  Description of Artificial Sequence: Synthetic peptide
KESGSVSSEQLAQFRSLD

SEQ ID NO: 65 - protein, 15 aa, Artificial Sequence
  Description of Artificial Sequence: Synthetic peptide
KTTPKLEEGEFSEAR

SEQ ID NO: 66 - protein, 6 aa, Artificial Sequence
  Description of Artificial Sequence: Synthetic peptide
QPKAAP

SEQ ID NO: 67 - protein, 13 aa, Artificial Sequence
  Description of Artificial Sequence: Synthetic peptide
QPKAAPSVTLFPP

SEQ ID NO: 68 - protein, 27 aa, Artificial Sequence
  Description of Artificial Sequence: Synthetic peptide
RADAAAAGGGGSGGGGSGGGGSGGGGS

SEQ ID NO: 69 - protein, 12 aa, Artificial Sequence
  Description of Artificial Sequence: Synthetic peptide
RADAAAAGGPGS

SEQ ID NO: 70 - protein, 6 aa, Artificial Sequence
  Description of Artificial Sequence: Synthetic peptide
RADAAP

SEQ ID NO: 71 - protein, 9 aa, Artificial Sequence
  Description of Artificial Sequence: Synthetic peptide
RADAAPTVS

SEQ ID NO: 72 - protein, 6 aa, Artificial Sequence
  Description of Artificial Sequence: Synthetic peptide
SAKTTP

SEQ ID NO: 73 - protein, 18 aa, Artificial Sequence
  Description of Artificial Sequence: Synthetic peptide
SAKTTPKLEEGEFSEARV

SEQ ID NO: 74 - protein, 10 aa, Artificial Sequence
  Description of Artificial Sequence: Synthetic peptide
SAKTTPKLGG

SEQ ID NO: 75 - protein, 14 aa, Artificial Sequence
  Description of Artificial Sequence: Synthetic peptide
STAGDTHLGGEDFD

SEQ ID NO: 76 - protein, 5 aa, Artificial Sequence
  Description of Artificial Sequence: Synthetic peptide
TVAAP

SEQ ID NO: 77 - protein, 12 aa, Artificial Sequence
  Description of Artificial Sequence: Synthetic peptide
TVAAPSVFIFPP

SEQ ID NO: 78 - protein, 24 aa, Artificial Sequence
  Description of Artificial Sequence: Synthetic peptide
TVAAPSVFIFPPTVAAPSVFIFPP

SEQ ID NO: 79 - protein, 13 aa, Artificial Sequence
  Description of Artificial Sequence: Synthetic peptide
KASGYKFTSYVMH

SEQ ID NO: 80 - protein, 16 aa, Artificial Sequence
  Description of Artificial Sequence: Synthetic peptide
YINPYNDVTKYNEKFK

SEQ ID NO: 81 - protein, 11 aa, Artificial Sequence
  Description of Artificial Sequence: Synthetic peptide
GSYYDYDGFVY

SEQ ID NO: 82 - protein, 10 aa, Artificial Sequence
  Description of Artificial Sequence: Synthetic peptide
SATSSVSYMH

SEQ ID NO: 83 - protein, 7 aa, Artificial Sequence
  Description of Artificial Sequence: Synthetic peptide
DTSKLAS

SEQ ID NO: 84 - protein, 9 aa, Artificial Sequence
  Description of Artificial Sequence: Synthetic peptide
QQWSSNPLT

SEQ ID NO: 85 - protein, 120 aa, Artificial Sequence
  Description of Artificial Sequence: Synthetic polypeptide
EVQLQQSGPELVKPGASVKMSCKASGYKFTSYVMHWVKQKPGQGLEWIGYINPYNDVTKYNEKFKGKATLTSDKSSSTAYMELSSLTSEDSAVHYCARGSYYDYDGFVYWGQGTLVTVSA

SEQ ID NO: 86 - protein, 106 aa, Artificial Sequence
  Description of Artificial Sequence: Synthetic polypeptide
QIVLTQSPAIMSASPGEKVTMTCSATSSVSYMHWYQQKSGTSPKRWIYDTSKLASGVPARFSGSGSGTSYSLTISSMEAEDAATYYCQQWSSNPLTFGAGTKLELK

SEQ ID NO: 87 - protein, 5 aa, Artificial Sequence
  Description of Artificial Sequence: Synthetic peptide
EYYMY

SEQ ID NO: 88 - protein, 17 aa, Artificial Sequence
  Description of Artificial Sequence: Synthetic peptide
RIDPEDGSIDYVEKFKK

SEQ ID NO: 89 - protein, 9 aa, Artificial Sequence
  Description of Artificial Sequence: Synthetic peptide
GKFNYRFAY

SEQ ID NO: 90 - protein, 16 aa, Artificial Sequence
  Description of Artificial Sequence: Synthetic peptide
RSSQSLLHSSGNTYLN

SEQ ID NO: 91 - protein, 7 aa, Artificial Sequence
  Description of Artificial Sequence: Synthetic peptide
LVSKLES

SEQ ID NO: 92 - protein, 8 aa, Artificial Sequence
  Description of Artificial Sequence: Synthetic peptide
QFTHYPYT

SEQ ID NO: 93 - protein, 118 aa, Artificial Sequence
  Description of Artificial Sequence: Synthetic polypeptide
EVQLQQSGPELQRPGASVKLSCKASGYIFTEYYMYWVKQRPKQGLELVGRIDPEDGSIDYVEKFKKKATLTADTSSNTAYMQLSSLTSEDTATYFCARGKFNYRFAYWGQGTLVTVSS

SEQ ID NO: 94 - protein, 112 aa, Artificial Sequence
  Description of Artificial Sequence: Synthetic polypeptide
DVVLTQTPPTLLATIGQSVSISCRSSQSLLHSSGNTYLNWLLQRTGQSPQPLIYLVSKLESGVPNRFSGSGSGTDFTLKISGVEAEDLGVYYCMQFTHYPYTFGAGTKLELK

SEQ ID NO: 95 - protein, 118 aa, Artificial Sequence
  Description of Artificial Sequence: Synthetic polypeptide
QVQLVQSGAEVKKPGASVKVSCKASGYTFTEYYMYWVRQAPGQGLELMGRIDPEDGSIDYVEKFKKKVTLTADTSSSTAYMELSSLTSDDTAVYYCARGKFNYRFAYWGQGTLVTVSS

SEQ ID NO: 96 - protein, 112 aa, Artificial Sequence
  Description of Artificial Sequence: Synthetic polypeptide
DVVMTQSPPSLLVTLGQPASISCRSSQSLLHSSGNTYLNWLLQRPGQSPQPLIYLVSKLESGVPDRFSGSGSGTDFTLKISGVEAEDVGVYYCMQFTHYPYTFGQGTKLEIK

SEQ ID NO: 97 - protein, 118 aa, Artificial Sequence; identical to SEQ ID NO: 93
  Description of Artificial Sequence: Synthetic polypeptide

SEQ ID NO: 98 - protein, 112 aa, Artificial Sequence; identical to SEQ ID NO: 96
  Description of Artificial Sequence: Synthetic polypeptide

SEQ ID NO: 99 - protein, 250 aa, Homo sapiens
MVAGSDAGRALGVLSVVCLLHCFGFISCFSQQIYGVVYGNVTFHVPSNVPLKEVLWKKQKDKVAELENSEFRAFSSFKNRVYLDTVSGSLTIYNLTSSDEDEYEMESPNITDTMKFFLYVLESLPSPTLTCALTNGSIEVQCMIPEHYNSHRGLIMYSWDCPMEQCKRNSTSIYFKMENDLPQKIQCTLSNPLFNTTSSIILTTCIPSSGHSRHRYALIPIPLAVITTCIVLYMNGILKCDRKPDRTNSN

SEQ ID NO: 100 - protein, 187 aa, Homo sapiens
FSQQIYGVVYGNVTFHVPSNVPLKEVLWKKQKDKVAELENSEFRAFSSFKNRVYLDTVSGSLTIYNLTSSDEDEYEMESPNITDTMKFFLYVLESLPSPTLTCALTNGSIEVQCMIPEHYNSHRGLIMYSWDCPMEQCKRNSTSIYFKMENDLPQKIQCTLSNPLFNTTSSIILTTCIPSSGHSRHR

SEQ ID NO: 101 - protein, 187 aa, Artificial Sequence
  Description of Artificial Sequence: Synthetic polypeptide
  MOD_RES (1)..(1): Phe or Ser
  MOD_RES (9)..(9): Val or Lys
  MOD_RES (21)..(21): Val or Gln
  MOD_RES (58)..(58): Val or Lys
  MOD_RES (85)..(85): Thr or Ser
  MOD_RES (93)..(93): Leu or Gly
XSQQIYGVXYGNVTFHVPSNXPLKEVLWKKQKDKVAELENSEFRAFSSFKNRVYLDTXSGSLTIYNLTSSDEDEYEMESPNITDXMKFFLYVXESLPSPTLTCALTNGSIEVQCMIPEHYNSHRGLIMYSWDCPMEQCKRNSTSIYFKMENDLPQKIQCTLSNPLFNTTSSIILTTCIPSSGHSRHR

SEQ ID NO: 102 - protein, 94 aa, Homo sapiens
SQQIYGVVYGNVTFHVPSNVPLKEVLWKKQKDKVAELENSEFRAFSSFKNRVYLDTVSGSLTIYNLTSSDEDEYEMESPNITDTMKFFLYVLES

SEQ ID NO: 103 - protein, 94 aa, Artificial Sequence
  Description of Artificial Sequence: Synthetic polypeptide
  MOD_RES (8)..(8): Val or Lys
  MOD_RES (20)..(20): Val or Gln
SQQIYGVXYGNVTFHVPSNXPLKEVLWKKQKDKVAELENSEFRAFSSFKNRVYLDTVSGSLTIYNLTSSDEDEYEMESPNITDTMKFFLYVLES

SEQ ID NO: 104 - protein, 5 aa, Artificial Sequence
  Description of Artificial Sequence: Synthetic peptide
DYGVS

SEQ ID NO: 105 - protein, 16 aa, Artificial Sequence
  Description of Artificial Sequence: Synthetic peptide
VIWGSETTYYNSALKS

SEQ ID NO: 106 - protein, 16 aa, Artificial Sequence
  Description of Artificial Sequence: Synthetic peptide
VIWGSETTYYSSSLKS

SEQ ID NO: 107 - protein, 16 aa, Artificial Sequence
  Description of Artificial Sequence: Synthetic peptide
VIWGSETTYYQSSLKS

SEQ ID NO: 108 - protein, 16 aa, Artificial Sequence
  Description of Artificial Sequence: Synthetic peptide
VIWGSETTYYNSSLKS

SEQ ID NO: 109 - protein, 12 aa, Artificial Sequence
  Description of Artificial Sequence: Synthetic peptide
HYYYGGSYAMDY

SEQ ID NO: 110 - protein, 11 aa, Artificial Sequence
  Description of Artificial Sequence: Synthetic peptide
RASQDISKYLN

SEQ ID NO: 111 - protein, 7 aa, Artificial Sequence
  Description of Artificial Sequence: Synthetic peptide
HTSRLHS

SEQ ID NO: 112 - protein, 9 aa, Artificial Sequence
  Description of Artificial Sequence: Synthetic peptide
QQGNTLPYT

SEQ ID NO: 113 - protein, 120 aa, Artificial Sequence
  Description of Artificial Sequence: Synthetic polypeptide
EVKLQESGPGLVAPSQSLSVTCTVSGVSLPDYGVSWIRQPPRKGLEWLGVIWGSETTYYNSALKSRLTIIKDNSKSQVFLKMNSLQTDDTAIYYCAKHYYYGGSYAMDYWGQGTSVTVSS

SEQ ID NO: 114 - protein, 120 aa, Artificial Sequence
  Description of Artificial Sequence: Synthetic polypeptide
QVQLQESGPGLVKPSETLSLTCTVSGVSLPDYGVSWIRQPPGKGLEWIGVIWGSETTYYSSSLKSRVTISKDNSKNQVSLKLSSVTAADTAVYYCAKHYYYGGSYAMDYWGQGTLVTVSS

SEQ ID NO: 115 - protein, 120 aa, Artificial Sequence
  Description of Artificial Sequence: Synthetic polypeptide
QVQLQESGPGLVKPSETLSLTCTVSGVSLPDYGVSWIRQPPGKGLEWIGVIWGSETTYYQSSLKSRVTISKDNSKNQVSLKLSSVTAADTAVYYCAKHYYYGGSYAMDYWGQGTLVTVSS

SEQ ID NO: 116 - protein, 120 aa, Artificial Sequence
  Description of Artificial Sequence: Synthetic polypeptide
QVQLQESGPGLVKPSETLSLTCTVSGVSLPDYGVSWIRQPPGKGLEWIGVIWGSETTYYNSSLKSRVTISKDNSKNQVSLKLSSVTAADTAVYYCAKHYYYGGSYAMDYWGQGTLVTVSS

SEQ ID NO: 117 - protein, 107 aa, Artificial Sequence
  Description of Artificial Sequence: Synthetic polypeptide
DIQMTQTTSSLSASLGDRVTISCRASQDISKYLNWYQQKPDGTVKLLIYHTSRLHSGVPSRFSGSGSGTDYSLTISNLEQEDIATYFCQQGNTLPYTFGGGTKLEIT

SEQ ID NO: 118 - protein, 107 aa, Artificial Sequence
  Description of Artificial Sequence: Synthetic polypeptide
EIVMTQSPATLSLSPGERATLSCRASQDISKYLNWYQQKPGQAPRLLIYHTSRLHSGIPARFSGSGSGTDYTLTISSLQPEDFAVYFCQQGNTLPYTFGQGTKLEIK

SEQ ID NO: 119 - protein, 242 aa, Artificial Sequence
  Description of Artificial Sequence: Synthetic polypeptide
EIVMTQSPATLSLSPGERATLSCRASQDISKYLNWYQQKPGQAPRLLIYHTSRLHSGIPARFSGSGSGTDYTLTISSLQPEDFAVYFCQQGNTLPYTFGQGTKLEIKGGGGSGGGGSGGGGSQVQLQESGPGLVKPSETLSLTCTVSGVSLPDYGVSWIRQPPGKGLEWIGVIWGSETTYYSSSLKSRVTISKDNSKNQVSLKLSSVTAADTAVYYCAKHYYYGGSYAMDYWGQGTLVTVSS

SEQ ID NO: 120 - protein, 242 aa, Artificial Sequence
  Description of Artificial Sequence: Synthetic polypeptide
EIVMTQSPATLSLSPGERATLSCRASQDISKYLNWYQQKPGQAPRLLIYHTSRLHSGIPARFSGSGSGTDYTLTISSLQPEDFAVYFCQQGNTLPYTFGQGTKLEIKGGGGSGGGGSGGGGSQVQLQESGPGLVKPSETLSLTCTVSGVSLPDYGVSWIRQPPGKGLEWIGVIWGSETTYYQSSLKSRVTISKDNSKNQVSLKLSSVTAADTAVYYCAKHYYYGGSYAMDYWGQGTLVTVSS

SEQ ID NO: 121 - protein, 242 aa, Artificial Sequence
  Description of Artificial Sequence: Synthetic polypeptide
QVQLQESGPGLVKPSETLSLTCTVSGVSLPDYGVSWIRQPPGKGLEWIGVIWGSETTYYSSSLKSRVTISKDNSKNQVSLKLSSVTAADTAVYYCAKHYYYGGSYAMDYWGQGTLVTVSSGGGGSGGGGSGGGGSEIVMTQSPATLSLSPGERATLSCRASQDISKYLNWYQQKPGQAPRLLIYHTSRLHSGIPARFSGSGSGTDYTLTISSLQPEDFAVYFCQQGNTLPYTFGQGTKLEIK

SEQ ID NO: 122 - protein, 242 aa, Artificial Sequence
  Description of Artificial Sequence: Synthetic polypeptide
QVQLQESGPGLVKPSETLSLTCTVSGVSLPDYGVSWIRQPPGKGLEWIGVIWGSETTYYQSSLKSRVTISKDNSKNQVSLKLSSVTAADTAVYYCAKHYYYGGSYAMDYWGQGTLVTVSSGGGGSGGGGSGGGGSEIVMTQSPATLSLSPGERATLSCRASQDISKYLNWYQQKPGQAPRLLIYHTSRLHSGIPARFSGSGSGTDYTLTISSLQPEDFAVYFCQQGNTLPYTFGQGTKLEIK

SEQ ID NO: 123 - protein, 247 aa, Artificial Sequence
  Description of Artificial Sequence: Synthetic polypeptide
EIVMTQSPATLSLSPGERATLSCRASQDISKYLNWYQQKPGQAPRLLIYHTSRLHSGIPARFSGSGSGTDYTLTISSLQPEDFAVYFCQQGNTLPYTFGQGTKLEIKGGGGSGGGGSGGGGSGGGGSQVQLQESGPGLVKPSETLSLTCTVSGVSLPDYGVSWIRQPPGKGLEWIGVIWGSETTYYSSSLKSRVTISKDNSKNQVSLKLSSVTAADTAVYYCAKHYYYGGSYAMDYWGQGTLVTVSS

SEQ ID NO: 124 - protein, 247 aa, Artificial Sequence
  Description of Artificial Sequence: Synthetic polypeptide
EIVMTQSPATLSLSPGERATLSCRASQDISKYLNWYQQKPGQAPRLLIYHTSRLHSGIPARFSGSGSGTDYTLTISSLQPEDFAVYFCQQGNTLPYTFGQGTKLEIKGGGGSGGGGSGGGGSGGGGSQVQLQESGPGLVKPSETLSLTCTVSGVSLPDYGVSWIRQPPGKGLEWIGVIWGSETTYYQSSLKSRVTISKDNSKNQVSLKLSSVTAADTAVYYCAKHYYYGGSYAMDYWGQGTLVTVSS

SEQ ID NO: 125 - protein, 247 aa, Artificial Sequence
  Description of Artificial Sequence: Synthetic polypeptide
QVQLQESGPGLVKPSETLSLTCTVSGVSLPDYGVSWIRQPPGKGLEWIGVIWGSETTYYSSSLKSRVTISKDNSKNQVSLKLSSVTAADTAVYYCAKHYYYGGSYAMDYWGQGTLVTVSSGGGGSGGGGSGGGGSGGGGSEIVMTQSPATLSLSPGERATLSCRASQDISKYLNWYQQKPGQAPRLLIYHTSRLHSGIPARFSGSGSGTDYTLTISSLQPEDFAVYFCQQGNTLPYTFGQGTKLEIK

SEQ ID NO: 126 - protein, 247 aa, Artificial Sequence
  Description of Artificial Sequence: Synthetic polypeptide
QVQLQESGPGLVKPSETLSLTCTVSGVSLPDYGVSWIRQPPGKGLEWIGVIWGSETTYYQSSLKSRVTISKDNSKNQVSLKLSSVTAADTAVYYCAKHYYYGGSYAMDYWGQGTLVTVSSGGGGSGGGGSGGGGSGGGGSEIVMTQSPATLSLSPGERATLSCRASQDISKYLNWYQQKPGQAPRLLIYHTSRLHSGIPARFSGSGSGTDYTLTISSLQPEDFAVYFCQQGNTLPYTFGQGTKLEIK

SEQ ID NO: 127 - protein, 247 aa, Artificial Sequence
  Description of Artificial Sequence: Synthetic polypeptide
EIVMTQSPATLSLSPGERATLSCRASQDISKYLNWYQQKPGQAPRLLIYHTSRLHSGIPARFSGSGSGTDYTLTISSLQPEDFAVYFCQQGNTLPYTFGQGTKLEIKGGGGSGGGGSGGGGSGGGGSQVQLQESGPGLVKPSETLSLTCTVSGVSLPDYGVSWIRQPPGKGLEWIGVIWGSETTYYNSSLKSRVTISKDNSKNQVSLKLSSVTAADTAVYYCAKHYYYGGSYAMDYWGQGTLVTVSS

SEQ ID NO: 128 - protein, 247 aa, Artificial Sequence
  Description of Artificial Sequence: Synthetic polypeptide
QVQLQESGPGLVKPSETLSLTCTVSGVSLPDYGVSWIRQPPGKGLEWIGVIWGSETTYYNSSLKSRVTISKDNSKNQVSLKLSSVTAADTAVYYCAKHYYYGGSYAMDYWGQGTLVTVSSGGGGSGGGGSGGGGSGGGGSEIVMTQSPATLSLSPGERATLSCRASQDISKYLNWYQQKPGQAPRLLIYHTSRLHSGIPARFSGSGSGTDYTLTISSLQPEDFAVYFCQQGNTLPYTFGQGTKLEIK

SEQ ID NO: 129 - protein, 242 aa, Artificial Sequence
  Description of Artificial Sequence: Synthetic polypeptide
EIVMTQSPATLSLSPGERATLSCRASQDISKYLNWYQQKPGQAPRLLIYHTSRLHSGIPARFSGSGSGTDYTLTISSLQPEDFAVYFCQQGNTLPYTFGQGTKLEIKGGGGSGGGGSGGGGSQVQLQESGPGLVKPSETLSLTCTVSGVSLPDYGVSWIRQPPGKGLEWIGVIWGSETTYYNSSLKSRVTISKDNSKNQVSLKLSSVTAADTAVYYCAKHYYYGGSYAMDYWGQGTLVTVSS

SEQ ID NO: 130 - protein, 242 aa, Artificial Sequence
  Description of Artificial Sequence: Synthetic polypeptide
QVQLQESGPGLVKPSETLSLTCTVSGVSLPDYGVSWIRQPPGKGLEWIGVIWGSETTYYNSSLKSRVTISKDNSKNQVSLKLSSVTAADTAVYYCAKHYYYGGSYAMDYWGQGTLVTVSSGGGGSGGGGSGGGGSEIVMTQSPATLSLSPGERATLSCRASQDISKYLNWYQQKPGQAPRLLIYHTSRLHSGIPARFSGSGSGTDYTLTISSLQPEDFAVYFCQQGNTLPYTFGQGTKLEIK

SEQ ID NO: 131 - protein, 4 aa, Artificial Sequence
  Description of Artificial Sequence: Synthetic peptide
GFLG

SEQ ID NO: 132 - protein, 4 aa, Artificial Sequence
  Description of Artificial Sequence: Synthetic peptide
ALAL

SEQ ID NO: 133 - protein, 10 aa, Artificial Sequence
  Description of Artificial Sequence: Synthetic peptide
GFTFSKNGMH

SEQ ID NO: 134 - protein, 17 aa, Artificial Sequence
  Description of Artificial Sequence: Synthetic peptide
MIYYDSSKMYYADTVKG

SEQ ID NO: 135 - protein, 9 aa, Artificial Sequence
  Description of Artificial Sequence: Synthetic peptide
FWWDLDFDH

SEQ ID NO: 136 - protein, 5 aa, Artificial Sequence
  Description of Artificial Sequence: Synthetic peptide
KNGMH

SEQ ID NO: 137 - protein, 17 aa, Artificial Sequence
  Description of Artificial Sequence: Synthetic peptide
MIYYDSSKMYYADTVKG

SEQ ID NO: 138 - protein, 9 aa, Artificial Sequence
  Description of Artificial Sequence: Synthetic peptide
FWWDLDFDH

SEQ ID NO: 139 - protein, 7 aa, Artificial Sequence
  Description of Artificial Sequence: Synthetic peptide
GFTFSKN

SEQ ID NO: 140 - protein, 6 aa, Artificial Sequence
  Description of Artificial Sequence: Synthetic peptide
YYDSSK

SEQ ID NO: 141 - protein, 9 aa, Artificial Sequence
  Description of Artificial Sequence: Synthetic peptide
FWWDLDFDH

SEQ ID NO: 142 - protein, 8 aa, Artificial Sequence
  Description of Artificial Sequence: Synthetic peptide
GFTFSKNG

SEQ ID NO: 143 - protein, 8 aa, Artificial Sequence
  Description of Artificial Sequence: Synthetic peptide
IYYDSSKM

SEQ ID NO: 144 - protein, 11 aa, Artificial Sequence
  Description of Artificial Sequence: Synthetic peptide
ASFWWDLDFDH

SEQ ID NO: 145 - protein, 118 aa, Artificial Sequence
  Description of Artificial Sequence: Synthetic polypeptide
QVQLVESGGGVVQPGRSLRLSCAASGFTFSKNGMHWVRQAPGKGLEWVAMIYYDSSKMYYADTVKGRFTISRDNSKNTLYLQMNSLRAEDTAVYYCASFWWDLDFDHWGQGTMVTVSS

SEQ ID NO: 146 - DNA, 354 bp, Artificial Sequence
  Description of Artificial Sequence: Synthetic polynucleotide
caggtgcagctggtggagtctggaggaggagtggtgcagccaggccggtccctgagactgtcttgcgccgccagcggcttcacctttagcaagaacggaatgcactgggtgcggcaggcacctggcaagggactggagtgggtggccatgatctactatgatagctccaagatgtactatgccgacaccgtgaagggcaggttcacaatctcccgcgataactctaagaataccctgtacctgcagatgaatagcctgagggccgaggacacagccgtgtactattgtgcctccttctggtgggacctggattttgaccactggggccagggcaccatggtgacagtgtctagc

SEQ ID NO: 147 - protein, 448 aa, Artificial Sequence
  Description of Artificial Sequence: Synthetic polypeptide
QVQLVESGGGVVQPGRSLRLSCAASGFTFSKNGMHWVRQAPGKGLEWVAMIYYDSSKMYYADTVKGRFTISRDNSKNTLYLQMNSLRAEDTAVYYCASFWWDLDFDHWGQGTMVTVSSASTKGPSVFPLAPSSKSTSGGTAALGCLVKDYFPEPVTVSWNSGALTSGVHTFPAVLQSSGLYSLSSVVTVPSSSLGTQTYICNVNHKPSNTKVDKRVEPKSCDKTHTCPPCPAPEAAGGPSVFLFPPKPKDTLMISRTPEVTCVVVDVSHEDPEVKFNWYVDGVEVHNAKTKPREEQYNSTYRVVSVLTVLHQDWLNGKEYKCKVSNKALPAPIEKTISKAKGQPREPQVYTLPPSREEMTKNQVSLTCLVKGFYPSDIAVEWESNGQPENNYKTTPPVLDSDGSFFLYSKLTVDKSRWQQGNVFSCSVMHEALHNHYTQKSLSLSPGK

SEQ ID NO: 148 - DNA, 1344 bp, Artificial Sequence
  Description of Artificial Sequence: Synthetic polynucleotide
caggtgcagctggtggagtctggaggaggagtggtgcagccaggccggtccctgagactgtcttgcgccgccagcggcttcacctttagcaagaacggaatgcactgggtgcggcaggcacctggcaagggactggagtgggtggccatgatctactatgatagctccaagatgtactatgccgacaccgtgaagggcaggttcacaatctcccgcgataactctaagaataccctgtacctgcagatgaatagcctgagggccgaggacacagccgtgtactattgtgcctccttctggtgggacctggattttgaccactggggccagggcaccatggtgacagtgtctagcgctagcaccaagggcccatcggtcttccccctggcaccctcctccaagagcacctctgggggcacagcggccctgggctgcctggtcaaggactacttccccgaaccggtgacggtgtcgtggaactcaggcgccctgaccagcggcgtgcacaccttcccggctgtcctacagtcctcaggactctactccctcagcagcgtggtgaccgtgccctccagcagcttgggcacccagacctacatctgcaacgtgaatcacaagcccagcaacaccaaggtggacaagagagttgagcccaaatcttgtgacaaaactcacacatgcccaccgtgcccagcacctgaagccgctgggggaccgtcagtcttcctcttccccccaaaacccaaggacaccctcatgatctcccggacccctgaggtcacatgcgtggtggtggacgtgagccacgaagaccctgaggtcaagttcaactggtacgtggacggcgtggaggtgcataatgccaagacaaagccgcgggaggagcagtacaacagcacgtaccgtgtggtcagcgtcctcaccgtcctgcaccaggactggctgaatggcaaggagtacaagtgcaaggtctccaacaaagccctcccagcccccatcgagaaaaccatctccaaagccaaagggcagccccgagaaccacaggtgtacaccctgcccccatcccgggaggagatgaccaagaaccaggtcagcctgacctgcctggtcaaaggcttctatcccagcgacatcgccgtggagtgggagagcaatgggcagccggagaacaactacaagaccacgcctcccgtgctggactccgacggctccttcttcctctacagcaagctcaccgtggacaagagcaggtggcagcaggggaacgtcttctcatgctccgtgatgcatgaggctctgcacaaccactacacgcagaagagcctctccctgtctccgggtaaa

SEQ ID NO: 149 - protein, 16 aa, Artificial Sequence
  Description of Artificial Sequence: Synthetic peptide
RSSQSLVRSDGTTYFN

SEQ ID NO: 150 - protein, 7 aa, Artificial Sequence
  Description of Artificial Sequence: Synthetic peptide
RVSNRFS

SEQ ID NO: 151 - protein, 9 aa, Artificial Sequence
  Description of Artificial Sequence: Synthetic peptide
LQSSHFPWT

SEQ ID NO: 152 - protein, 16 aa, Artificial Sequence
  Description of Artificial Sequence: Synthetic peptide
RSSQSLVRSDGTTYFN

SEQ ID NO: 153 - protein, 7 aa, Artificial Sequence
  Description of Artificial Sequence: Synthetic peptide
RVSNRFS

SEQ ID NO: 154 - protein, 9 aa, Artificial Sequence
  Description of Artificial Sequence: Synthetic peptide
LQSSHFPWT

SEQ ID NO: 155 - protein, 12 aa, Artificial Sequence
  Description of Artificial Sequence: Synthetic peptide
SQSLVRSDGTTY

SEQ ID NO: 156 - protein, 3 aa, Artificial Sequence
  Description of Artificial Sequence: Synthetic peptide
RVS

SEQ ID NO: 157 - protein, 6 aa, Artificial Sequence
  Description of Artificial Sequence: Synthetic peptide
SSHFPW

SEQ ID NO: 158 - protein, 11 aa, Artificial Sequence
  Description of Artificial Sequence: Synthetic peptide
QSLVRSDGTTY

SEQ ID NO: 159 - protein, 3 aa, Artificial Sequence
  Description of Artificial Sequence: Synthetic peptide
RVS

SEQ ID NO: 160 - protein, 9 aa, Artificial Sequence
  Description of Artificial Sequence: Synthetic peptide
LQSSHFPWT

SEQ ID NO: 161 - protein, 112 aa, Artificial Sequence
  Description of Artificial Sequence: Synthetic polypeptide
DIVMTQTPLSSPVTLGQPASISCRSSQSLVRSDGTTYFNWYQQRPGQPPRLLIYRVSNRFSGVPDRFSGSGAGTDFTLKISRVEAEDVGVYYCLQSSHFPWTFGGGTKVEIK

SEQ ID NO: 162 - DNA, 336 bp, Artificial Sequence
  Description of Artificial Sequence: Synthetic polynucleotide
gacatcgtgatgacccagacaccactgagctccccagtgaccctgggacagccagccagcatctcctgccggtctagccagtccctggtgagatctgatggcaccacatacttcaactggtatcagcagaggcctggacagccacctaggctgctgatctaccgggtgagcaatagattctccggcgtgccagacaggttttctggcagcggagcaggaaccgacttcaccctgaagatctctagagtggaggccgaggacgtgggcgtgtactattgtctgcagtcctctcacttcccttggacctttggcggcggcacaaaggtggagatcaag

SEQ ID NO: 163 - protein, 219 aa, Artificial Sequence
  Description of Artificial Sequence: Synthetic polypeptide
DIVMTQTPLSSPVTLGQPASISCRSSQSLVRSDGTTYFNWYQQRPGQPPRLLIYRVSNRFSGVPDRFSGSGAGTDFTLKISRVEAEDVGVYYCLQSSHFPWTFGGGTKVEIKRTVAAPSVFIFPPSDEQLKSGTASVVCLLNNFYPREAKVQWKVDNALQSGNSQESVTEQDSKDSTYSLSSTLTLSKADYEKHKVYACEVTHQGLSSPVTKSFNRGEC

SEQ ID NO: 164 - DNA, 657 bp, Artificial Sequence
  Description of Artificial Sequence: Synthetic polynucleotide
gacatcgtgatgacccagacaccactgagctccccagtgaccctgggacagccagccagcatctcctgccggtctagccagtccctggtgagatctgatggcaccacatacttcaactggtatcagcagaggcctggacagccacctaggctgctgatctaccgggtgagcaatagattctccggcgtgccagacaggttttctggcagcggagcaggaaccgacttcaccctgaagatctctagagtggaggccgaggacgtgggcgtgtactattgtctgcagtcctctcacttcccttggacctttggcggcggcacaaaggtggagatcaagcgtacggtggctgcaccatctgtcttcatcttcccgccatctgatgagcagttgaaatctggaactgcctctgttgtgtgcctgctgaataacttctatccccgcgaggccaaagtacagtggaaggtggataacgccctccaatcgggtaactcccaggagagtgtcacagagcaggacagcaaggacagcacctacagcctcagcagcaccctgacgctgagcaaagcagactacgagaaacacaaagtctacgcctgcgaagtcacccatcagggcctgagctcgcccgtcacaaagagcttcaaccgcggagagtgt

SEQ ID NO: 165 - protein, 10 aa, Artificial Sequence
  Description of Artificial Sequence: Synthetic peptide
GYTFTSYYIY

SEQ ID NO: 166 - protein, 17 aa, Artificial Sequence
  Description of Artificial Sequence: Synthetic peptide
YIYPGHDAIYYSENFKG

SEQ ID NO: 167 - protein, 10 aa, Artificial Sequence
  Description of Artificial Sequence: Synthetic peptide
PNTMMAPLAY

SEQ ID NO: 168 - protein, 5 aa, Artificial Sequence
  Description of Artificial Sequence: Synthetic peptide
SYYIY

SEQ ID NO: 169 - protein, 17 aa, Artificial Sequence
  Description of Artificial Sequence: Synthetic peptide
YIYPGHDAIYYSENFKG

SEQ ID NO: 170 - protein, 10 aa, Artificial Sequence
  Description of Artificial Sequence: Synthetic peptide
PNTMMAPLAY

SEQ ID NO: 171 - protein, 7 aa, Artificial Sequence
  Description of Artificial Sequence: Synthetic peptide
GYTFTSY

SEQ ID NO: 172 - protein, 6 aa, Artificial Sequence
  Description of Artificial Sequence: Synthetic peptide
YPGHDA

SEQ ID NO: 173 - protein, 10 aa, Artificial Sequence
  Description of Artificial Sequence: Synthetic peptide
PNTMMAPLAY

SEQ ID NO: 174 - protein, 8 aa, Artificial Sequence
  Description of Artificial Sequence: Synthetic peptide
GYTFTSYY

SEQ ID NO: 175 - protein, 8 aa, Artificial Sequence
  Description of Artificial Sequence: Synthetic peptide
IYPGHDAI

SEQ ID NO: 176 - protein, 12 aa, Artificial Sequence
  Description of Artificial Sequence: Synthetic peptide
VRPNTMMAPLAY

SEQ ID NO: 177 - protein, 119 aa, Artificial Sequence
  Description of Artificial Sequence: Synthetic polypeptide
QVQLVQSGAEVKKPGASVKVSCKASGYTFTSYYIYWVRQAPGQRLEWMGYIYPGHDAIYYSENFKGRVTITADTSASTAYMELSSLRSEDTAVYYCVRPNTMMAPLAYWGQGTLVTVSS

SEQ ID NO: 178 - DNA, 357 bp, Artificial Sequence
  Description of Artificial Sequence: Synthetic polynucleotide
caggtgcagctggtgcagagcggagcagaggtgaagaagccaggagccagcgtgaaggtgtcctgcaaggcctctggctacaccttcacatcctactatatctattgggtgcggcaggcaccaggacagagactggagtggatgggctacatctatcccggccacgacgccatctactattctgagaactttaagggccgggtgaccatcacagccgatacctccgcctctacagcctacatggagctgagctccctgaggagcgaggacaccgccgtgtactattgcgtgcggcccaatacaatgatggcacctctggcctattggggacagggcaccctggtgacagtgtctagc

SEQ ID NO: 179 - protein, 449 aa, Artificial Sequence
  Description of Artificial Sequence: Synthetic polypeptide
QVQLVQSGAEVKKPGASVKVSCKASGYTFTSYYIYWVRQAPGQRLEWMGYIYPGHDAIYYSENFKGRVTITADTSASTAYMELSSLRSEDTAVYYCVRPNTMMAPLAYWGQGTLVTVSSASTKGPSVFPLAPSSKSTSGGTAALGCLVKDYFPEPVTVSWNSGALTSGVHTFPAVLQSSGLYSLSSVVTVPSSSLGTQTYICNVNHKPSNTKVDKRVEPKSCDKTHTCPPCPAPEAAGGPSVFLFPPKPKDTLMISRTPEVTCVVVDVSHEDPEVKFNWYVDGVEVHNAKTKPREEQYNSTYRVVSVLTVLHQDWLNGKEYKCKVSNKALPAPIEKTISKAKGQPREPQVYTLPPSREEMTKNQVSLTCLVKGFYPSDIAVEWESNGQPENNYKTTPPVLDSDGSFFLYSKLTVDKSRWQQGNVFSCSVMHEALHNHYTQKSLSLSPGK

SEQ ID NO: 180 - DNA, 1347 bp, Artificial Sequence
  Description of Artificial Sequence: Synthetic polynucleotide
caggtgcagctggtgcagagcggagcagaggtgaagaagccaggagccagcgtgaaggtgtcctgcaaggcctctggctacaccttcacatcctactatatctattgggtgcggcaggcaccaggacagagactggagtggatgggctacatctatcccggccacgacgccatctactattctgagaactttaagggccgggtgaccatcacagccgatacctccgcctctacagcctacatggagctgagctccctgaggagcgaggacaccgccgtgtactattgcgtgcggcccaatacaatgatggcacctctggcctattggggacagggcaccctggtgacagtgtctagcgctagcaccaagggcccatcggtcttccccctggcaccctcctccaagagcacctctgggggcacagcggccctgggctgcctggtcaaggactacttccccgaaccggtgacggtgtcgtggaactcaggcgccctgaccagcggcgtgcacaccttcccggctgtcctacagtcctcaggactctactccctcagcagcgtggtgaccgtgccctccagcagcttgggcacccagacctacatctgcaacgtgaatcacaagcccagcaacaccaaggtggacaagagagttgagcccaaatcttgtgacaaaactcacacatgcccaccgtgcccagcacctgaagccgctgggggaccgtcagtcttcctcttccccccaaaacccaaggacaccctcatgatctcccggacccctgaggtcacatgcgtggtggtggacgtgagccacgaagaccctgaggtcaagttcaactggtacgtggacggcgtggaggtgcataatgccaagacaaagccgcgggaggagcagtacaacagcacgtaccgtgtggtcagcgtcctcaccgtcctgcaccaggactggctgaatggcaaggagtacaagtgcaaggtctccaacaaagccctcccagcccccatcgagaaaaccatctccaaagccaaagggcagccccgagaaccacaggtgtacaccctgcccccatcccgggaggagatgaccaagaaccaggtcagcctgacctgcctggtcaaaggcttctatcccagcgacatcgccgtggagtgggagagcaatgggcagccggagaacaactacaagaccacgcctcccgtgctggactccgacggctccttcttcctctacagcaagctcaccgtggacaagagcaggtggcagcaggggaacgtcttctcatgctccgtgatgcatgaggctctgcacaaccactacacgcagaagagcctctccctgtctccgggtaaa

SEQ ID NO: 181 - protein, 16 aa, Artificial Sequence
  Description of Artificial Sequence: Synthetic peptide
RSSQSLIYSIGNTYLH

SEQ ID NO: 182 - protein, 7 aa, Artificial Sequence
  Description of Artificial Sequence: Synthetic peptide
RVSNRFS

SEQ ID NO: 183 - protein, 9 aa, Artificial Sequence
  Description of Artificial Sequence: Synthetic peptide
FQSTHLPYT

SEQ ID NO: 184 - protein, 16 aa, Artificial Sequence
  Description of Artificial Sequence: Synthetic peptide
RSSQSLIYSIGNTYLH

SEQ ID NO: 185 - protein, 7 aa, Artificial Sequence
  Description of Artificial Sequence: Synthetic peptide
RVSNRFS

SEQ ID NO: 186 - protein, 9 aa, Artificial Sequence
  Description of Artificial Sequence: Synthetic peptide
FQSTHLPYT

SEQ ID NO: 187 - protein, 12 aa, Artificial Sequence
  Description of Artificial Sequence: Synthetic peptide
SQSLIYSIGNTY

SEQ ID NO: 188 - protein, 3 aa, Artificial Sequence
  Description of Artificial Sequence: Synthetic peptide
RVS

SEQ ID NO: 189 - protein, 6 aa, Artificial Sequence
  Description of Artificial Sequence: Synthetic peptide
STHLPY

SEQ ID NO: 190 - protein, 11 aa, Artificial Sequence
  Description of Artificial Sequence: Synthetic peptide
QSLIYSIGNTY

SEQ ID NO: 191 - protein, 3 aa, Artificial Sequence
  Description of Artificial Sequence: Synthetic peptide
RVS

SEQ ID NO: 192 - protein, 9 aa, Artificial Sequence
  Description of Artificial Sequence: Synthetic peptide
FQSTHLPYT

SEQ ID NO: 193 - protein, 112 aa, Artificial Sequence
  Description of Artificial Sequence: Synthetic polypeptide
DVVMTQSPLSLPVTLGQPASISCRSSQSLIYSIGNTYLHWYQQRPGQSPRLLIYRVSNRFSGVPDRFSGSGSGTDFTLKISRVEAEDVGVYYCFQSTHLPYTFGQGTKLEIK

SEQ ID NO: 194 - DNA, 336 bp, Artificial Sequence
  Description of Artificial Sequence: Synthetic polynucleotide
gacgtggtcatgacacagtccccactgtctctgcctgtgaccctgggacagccagcctctatcagctgccggagctcccagagcctgatctactccatcggcaacacatacctgcactggtatcagcagaggccaggacagtccccaaggctgctgatctatcgggtgtctaatagattcagcggcgtgcctgaccggttttccggctctggcagcggcaccgatttcacactgaagatctccagggtggaggccgaggatgtgggcgtgtactattgtttccagtctacccacctgccatacacatttggccagggcaccaagctggagatcaag

SEQ ID NO: 195 - protein, 219 aa, Artificial Sequence
  Description of Artificial Sequence: Synthetic polypeptide
DVVMTQSPLSLPVTLGQPASISCRSSQSLIYSIGNTYLHWYQQRPGQSPRLLIYRVSNRFSGVPDRFSGSGSGTDFTLKISRVEAEDVGVYYCFQSTHLPYTFGQGTKLEIKRTVAAPSVFIFPPSDEQLKSGTASVVCLLNNFYPREAKVQWKVDNALQSGNSQESVTEQDSKDSTYSLSSTLTLSKADYEKHKVYACEVTHQGLSSPVTKSFNRGEC

SEQ ID NO: 196 - DNA, 657 bp, Artificial Sequence
  Description of Artificial Sequence: Synthetic polynucleotide
gacgtggtcatgacacagtccccactgtctctgcctgtgaccctgggacagccagcctctatcagctgccggagctcccagagcctgatctactccatcggcaacacatacctgcactggtatcagcagaggccaggacagtccccaaggctgctgatctatcgggtgtctaatagattcagcggcgtgcctgaccggttttccggctctggcagcggcaccgatttcacactgaagatctccagggtggaggccgaggatgtgggcgtgtactattgtttccagtctacccacctgccatacacatttggccagggcaccaagctggagatcaagcgtacggtggctgcaccatctgtcttcatcttcccgccatctgatgagcagttgaaatctggaactgcctctgttgtgtgcctgctgaataacttctatccccgcgaggccaaagtacagtggaaggtggataacgccctccaatcgggtaactcccaggagagtgtcacagagcaggacagcaaggacagcacctacagcctcagcagcaccctgacgctgagcaaagcagactacgagaaacacaaagtctacgcctgcgaagtcacccatcagggcctgagctcgcccgtcacaaagagcttcaaccgcggagagtgt

SEQ ID NO: 197 - protein, 10 aa, Artificial Sequence
  Description of Artificial Sequence: Synthetic peptide
GFSLTTYNVH

SEQ ID NO: 198 - protein, 16 aa, Artificial Sequence
  Description of Artificial Sequence: Synthetic peptide
RMRYSGDTSFNAALTS

SEQ ID NO: 199 - protein, 15 aa, Artificial Sequence
  Description of Artificial Sequence: Synthetic peptide
DPMYIPNYSYGVMNA

SEQ ID NO: 200 - protein, 5 aa, Artificial Sequence
  Description of Artificial Sequence: Synthetic peptide
TYNVH

SEQ ID NO: 201 - protein, 16 aa, Artificial Sequence
  Description of Artificial Sequence: Synthetic peptide
RMRYSGDTSFNAALTS

SEQ ID NO: 202 - protein, 15 aa, Artificial Sequence
  Description of Artificial Sequence: Synthetic peptide
DPMYIPNYSYGVMNA

SEQ ID NO: 203 - protein, 7 aa, Artificial Sequence
  Description of Artificial Sequence: Synthetic peptide
GFSLTTY

SEQ ID NO: 204 - protein, 5 aa, Artificial Sequence
  Description of Artificial Sequence: Synthetic peptide
RYSGD

SEQ ID NO: 205 - protein, 15 aa, Artificial Sequence
  Description of Artificial Sequence: Synthetic peptide
DPMYIPNYSYGVMNA

SEQ ID NO: 206 - protein, 8 aa, Artificial Sequence
  Description of Artificial Sequence: Synthetic peptide
GFSLTTYN

SEQ ID NO: 207 - protein, 7 aa, Artificial Sequence
  Description of Artificial Sequence: Synthetic peptide
MRYSGDT

SEQ ID NO: 208 - protein, 17 aa, Artificial Sequence
  Description of Artificial Sequence: Synthetic peptide
TSDPMYIPNYSYGVMNA

SEQ ID NO: 209 - protein, 123 aa, Artificial Sequence
  Description of Artificial Sequence: Synthetic polypeptide
QVQLQESGPGLVKPSETLSLTCTVSGFSLTTYNVHWIRQPPGKGLEWIGRMRYSGDTSFNAALTSRVTISRDTSKNQVSLKLSSVTAADTAVYYCTSDPMYIPNYSYGVMNAWGQGTTVTVSS

SEQ ID NO: 210 - DNA, 369 bp, Artificial Sequence
  Description of Artificial Sequence: Synthetic polynucleotide
caggtgcagctgcaggagagcggacctggactggtgaagccaagcgagaccctgtccctgacctgcacagtgtccggcttctctctgaccacatacaacgtgcactggatcagacagccacctggcaagggactggagtggatcggccggatgagatattctggcgacaccagctttaacgccgccctgacctctagggtgacaatctcccgcgatacatctaagaatcaggtgtccctgaagctgagctccgtgaccgcagcagacacagccgtgtactattgtaccagcgatccaatgtacatccccaactactcctatggcgtgatgaatgcctggggccagggcaccacagtgacagtgtctagc

SEQ ID NO: 211 - protein, 453 aa, Artificial Sequence
  Description of Artificial Sequence: Synthetic polypeptide
QVQLQESGPGLVKPSETLSLTCTVSGFSLTTYNVHWIRQPPGKGLEWIGRMRYSGDTSFNAALTSRVTISRDTSKNQVSLKLSSVTAADTAVYYCTSDPMYIPNYSYGVMNAWGQGTTVTVSSASTKGPSVFPLAPSSKSTSGGTAALGCLVKDYFPEPVTVSWNSGALTSGVHTFPAVLQSSGLYSLSSVVTVPSSSLGTQTYICNVNHKPSNTKVDKRVEPKSCDKTHTCPPCPAPEAAGGPSVFLFPPKPKDTLMISRTPEVTCVVVDVSHEDPEVKFNWYVDGVEVHNAKTKPREEQYNSTYRVVSVLTVLHQDWLNGKEYKCKVSNKALPAPIEKTISKAKGQPREPQVYTLPPSREEMTKNQVSLTCLVKGFYPSDIAVEWESNGQPENNYKTTPPVLDSDGSFFLYSKLTVDKSRWQQGNVFSCSVMHEALHNHYTQKSLSLSPGK

SEQ ID NO: 212 - DNA, 1359 bp, Artificial Sequence
  Description of Artificial Sequence: Synthetic polynucleotide
caggtgcagctgcaggagagcggacctggactggtgaagccaagcgagaccctgtccctgacctgcacagtgtccggcttctctctgaccacatacaacgtgcactggatcagacagccacctggcaagggactggagtggatcggccggatgagatattctggcgacaccagctttaacgccgccctgacctctagggtgacaatctcccgcgatacatctaagaatcaggtgtccctgaagctgagctccgtgaccgcagcagacacagccgtgtactattgtaccagcgatccaatgtacatccccaactactcctatggcgtgatgaatgcctggggccagggcaccacagtgacagtgtctagcgctagcaccaagggcccatcggtcttccccctggcaccctcctccaagagcacctctgggggcacagcggccctgggctgcctggtcaaggactacttccccgaaccggtgacggtgtcgtggaactcaggcgccctgaccagcggcgtgcacaccttcccggctgtcctacagtcctcaggactctactccctcagcagcgtggtgaccgtgccctccagcagcttgggcacccagacctacatctgcaacgtgaatcacaagcccagcaacaccaaggtggacaagagagttgagcccaaatcttgtgacaaaactcacacatgcccaccgtgcccagcacctgaagccgctgggggaccgtcagtcttcctcttccccccaaaacccaaggacaccctcatgatctcccggacccctgaggtcacatgcgtggtggtggacgtgagccacgaagaccctgaggtcaagttcaactggtacgtggacggcgtggaggtgcataatgccaagacaaagccgcgggaggagcagtacaacagcacgtaccgtgtggtcagcgtcctcaccgtcctgcaccaggactggctgaatggcaaggagtacaagtgcaaggtctccaacaaagccctcccagcccccatcgagaaaaccatctccaaagccaaagggcagccccgagaaccacaggtgtacaccctgcccccatcccgggaggagatgaccaagaaccaggtcagcctgacctgcctggtcaaaggcttctatcccagcgacatcgccgtggagtgggagagcaatgggcagccggagaacaactacaagaccacgcctcccgtgctggactccgacggctccttcttcctctacagcaagctcaccgtggacaagagcaggtggcagcaggggaacgtcttctcatgctccgtgatgcatgaggctctgcacaaccactacacgcagaagagcctctccctgtctccgggtaaa

SEQ ID NO: 213 - protein, 11 aa, Artificial Sequence
  Description of Artificial Sequence: Synthetic peptide
KASQNINNYLN

SEQ ID NO: 214 - protein, 7 aa, Artificial Sequence
  Description of Artificial Sequence: Synthetic peptide
NTDHLQA

SEQ ID NO: 215 - protein, 8 aa, Artificial Sequence
  Description of Artificial Sequence: Synthetic peptide
LQHRSRYT

SEQ ID NO: 216 - protein, 11 aa, Artificial Sequence
  Description of Artificial Sequence: Synthetic peptide
KASQNINNYLN

SEQ ID NO: 217 - protein, 7 aa, Artificial Sequence
  Description of Artificial Sequence: Synthetic peptide
NTDHLQA

SEQ ID NO: 218 - protein, 8 aa, Artificial Sequence
  Description of Artificial Sequence: Synthetic peptide
LQHRSRYT

SEQ ID NO: 219 - protein, 7 aa, Artificial Sequence
  Description of Artificial Sequence: Synthetic peptide
SQNINNY

SEQ ID NO: 220 - protein, 3 aa, Artificial Sequence
  Description of Artificial Sequence: Synthetic peptide
NTD

SEQ ID NO: 221 - protein, 5 aa, Artificial Sequence
  Description of Artificial Sequence: Synthetic peptide
HRSRY

SEQ ID NO: 222 - protein, 6 aa, Artificial Sequence
  Description of Artificial Sequence: Synthetic peptide
QNINNY

SEQ ID NO: 223 - protein, 10 aa, Artificial Sequence
  Description of Artificial Sequence: Synthetic peptide
NTDHLQAGVP

SEQ ID NO: 224 - protein, 8 aa, Artificial Sequence
  Description of Artificial Sequence: Synthetic peptide
LQHRSRYT

SEQ ID NO: 225 - protein, 106 aa, Artificial Sequence
  Description of Artificial Sequence: Synthetic polypeptide
DIQMTQSPSSLSASVGDRVTITCKASQNINNYLNWYQQKPGKAPKLLIYNTDHLQAGVPSRFSGSGSGTDYTLTISSLQPEDFATYFCLQHRSRYTFGPGTKVDIK

SEQ ID NO: 226 - DNA, 313 bp, Artificial Sequence
  Description of Artificial Sequence: Synthetic polynucleotide
gacatccagatgacccagagccctagctccctgtccgcctctgtgggcgatagggtgaccatcacatgcaaggcctcccagaacatcaacaattacctgaattggtatcagcagaagcccggcaaggcccctaagctgctgatctacaacacagaccacctgcaggcaggagtgccatctcggttcagcggctccggctctggaaccgactataccctgacaatctctagcctgcagccagaggatttcgccacatacttttgtctgcagcaccggagcagatatacctttggccccggcacaaaggtggata

SEQ ID NO: 227 - protein, 213 aa, Artificial Sequence
  Description of Artificial Sequence: Synthetic polypeptide
DIQMTQSPSSLSASVGDRVTITCKASQNINNYLNWYQQKPGKAPKLLIYNTDHLQAGVPSRFSGSGSGTDYTLTISSLQPEDFATYFCLQHRSRYTFGPGTKVDIKRTVAAPSVFIFPPSDEQLKSGTASVVCLLNNFYPREAKVQWKVDNALQSGNSQESVTEQDSKDSTYSLSSTLTLSKADYEKHKVYACEVTHQGLSSPVTKSFNRGEC

SEQ ID NO: 228 - DNA, 634 bp, Artificial Sequence
  Description of Artificial Sequence: Synthetic polynucleotide
gacatccagatgacccagagccctagctccctgtccgcctctgtgggcgatagggtgaccatcacatgcaaggcctcccagaacatcaacaattacctgaattggtatcagcagaagcccggcaaggcccctaagctgctgatctacaacacagaccacctgcaggcaggagtgccatctcggttcagcggctccggctctggaaccgactataccctgacaatctctagcctgcagccagaggatttcgccacatacttttgtctgcagcaccggagcagatatacctttggccccggcacaaaggtggatacgtacggtggctgcaccatctgtcttcatcttcccgccatctgatgagcagttgaaatctggaactgcctctgttgtgtgcctgctgaataacttctatccccgcgaggccaaagtacagtggaaggtggataacgccctccaatcgggtaactcccaggagagtgtcacagagcaggacagcaaggacagcacctacagcctcagcagcaccctgacgctgagcaaagcagactacgagaaacacaaagtctacgcctgcgaagtcacccatcagggcctgagctcgcccgtcacaaagagcttcaaccgcggagagtgt

SEQ ID NO: 229 - protein, 10 aa, Artificial Sequence
  Description of Artificial Sequence: Synthetic peptide
GFSLTTYNVH

SEQ ID NO: 230 - protein, 16 aa, Artificial Sequence
  Description of Artificial Sequence: Synthetic peptide
RMRYSGDTSFNAALTS

SEQ ID NO: 231 - protein, 15 aa, Artificial Sequence
  Description of Artificial Sequence: Synthetic peptide
DPMYIPNYSYGVMNA

SEQ ID NO: 232 - protein, 5 aa, Artificial Sequence
  Description of Artificial Sequence: Synthetic peptide
TYNVH

SEQ ID NO: 233 - protein, 16 aa, Artificial Sequence
  Description of Artificial Sequence: Synthetic peptide
RMRYSGDTSFNAALTS

SEQ ID NO: 234 - protein, 15 aa, Artificial Sequence
  Description of Artificial Sequence: Synthetic peptide
DPMYIPNYSYGVMNA

SEQ ID NO: 235 - protein, 7 aa, Artificial Sequence
  Description of Artificial Sequence: Synthetic peptide
GFSLTTY

SEQ ID NO: 236 - protein, 5 aa, Artificial Sequence
  Description of Artificial Sequence: Synthetic peptide
RYSGD

SEQ ID NO: 237 - protein, 15 aa, Artificial Sequence
  Description of Artificial Sequence: Synthetic peptide
DPMYIPNYSYGVMNA

SEQ ID NO: 238 - protein, 8 aa, Artificial Sequence
  Description of Artificial Sequence: Synthetic peptide
GFSLTTYN

SEQ ID NO: 239 - protein, 7 aa, Artificial Sequence
  Description of Artificial Sequence: Synthetic peptide
MRYSGDT

SEQ ID NO: 240 - protein, 17 aa, Artificial Sequence
  Description of Artificial Sequence: Synthetic peptide
ARDPMYIPNYSYGVMNA

SEQ ID NO: 241 - protein, 123 aa, Artificial Sequence
  Description of Artificial Sequence: Synthetic polypeptide
QVQLQESGPGLVKPSETLSLTCTVSGFSLTTYNVHWIRQPPGKGLEWIGRMRYSGDTSFNAALTSRVTISVDTSKNQFSLKLSSVTAADTAVYYCARDPMYIPNYSYGVMNAWGQGTTVTVSS

SEQ ID NO: 242 - DNA, 369 bp, Artificial Sequence
  Description of Artificial Sequence: Synthetic polynucleotide
caggtgcagctgcaggagtctggacctggactggtgaagccaagcgagaccctgtccctgacctgcacagtgtccggcttctctctgaccacatacaacgtgcactggatcaggcagccacctggcaagggactggagtggatcggccggatgagatattctggcgacaccagcttcaacgccgccctgaccagcagggtgacaatctccgtggatacatctaagaatcagttttccctgaagctgagctccgtgaccgcagcagacacagccgtgtactattgtgcccgggaccccatgtacatccccaactactcctatggcgtgatgaatgcctggggccagggcaccacagtgacagtgtctagc

SEQ ID NO: 243 - protein, 453 aa, Artificial Sequence
  Description of Artificial Sequence: Synthetic polypeptide
QVQLQESGPGLVKPSETLSLTCTVSGFSLTTYNVHWIRQPPGKGLEWIGRMRYSGDTSFNAALTSRVTISVDTSKNQFSLKLSSVTAADTAVYYCARDPMYIPNYSYGVMNAWGQGTTVTVSSASTKGPSVFPLAPSSKSTSGGTAALGCLVKDYFPEPVTVSWNSGALTSGVHTFPAVLQSSGLYSLSSVVTVPSSSLGTQTYICNVNHKPSNTKVDKRVEPKSCDKTHTCPPCPAPEAAGGPSVFLFPPKPKDTLMISRTPEVTCVVVDVSHEDPEVKFNWYVDGVEVHNAKTKPREEQYNSTYRVVSVLTVLHQDWLNGKEYKCKVSNKALPAPIEKTISKAKGQPREPQVYTLPPSREEMTKNQVSLTCLVKGFYPSDIAVEWESNGQPENNYKTTPPVLDSDGSFFLYSKLTVDKSRWQQGNVFSCSVMHEALHNHYTQKSLSLSPGK

SEQ ID NO: 244 - DNA, 1359 bp, Artificial Sequence
  Description of Artificial Sequence: Synthetic polynucleotide
caggtgcagctgcaggagtctggacctggactggtgaagccaagcgagaccctgtccctgacctgcacagtgtccggcttctctctgaccacatacaacgtgcactggatcaggcagccacctggcaagggactggagtggatcggccggatgagatattctggcgacaccagcttcaacgccgccctgaccagcagggtgacaatctccgtggatacatctaagaatcagttttccctgaagctgagctccgtgaccgcagcagacacagccgtgtactattgtgcccgggaccccatgtacatccccaactactcctatggcgtgatgaatgcctggggccagggcaccacagtgacagtgtctagcgctagcaccaagggcccatcggtcttccccctggcaccctcctccaagagcacctctgggggcacagcggccctgggctgcctggtcaaggactacttccccgaaccggtgacggtgtcgtggaactcaggcgccctgaccagcggcgtgcacaccttcccggctgtcctacagtcctcaggactctactccctcagcagcgtggtgaccgtgccctccagcagcttgggcacccagacctacatctgcaacgtgaatcacaagcccagcaacaccaaggtggacaagagagttgagcccaaatcttgtgacaaaactcacacatgcccaccgtgcccagcacctgaagccgctgggggaccgtcagtcttcctcttccccccaaaacccaaggacaccctcatgatctcccggacccctgaggtcacatgcgtggtggtggacgtgagccacgaagaccctgaggtcaagttcaactggtacgtggacggcgtggaggtgcataatgccaagacaaagccgcgggaggagcagtacaacagcacgtaccgtgtggtcagcgtcctcaccgtcctgcaccaggactggctgaatggcaaggagtacaagtgcaaggtctccaacaaagccctcccagcccccatcgagaaaaccatctccaaagccaaagggcagccccgagaaccacaggtgtacaccctgcccccatcccgggaggagatgaccaagaaccaggtcagcctgacctgcctggtcaaaggcttctatcccagcgacatcgccgtggagtgggagagcaatgggcagccggagaacaactacaagaccacgcctcccgtgctggactccgacggctccttcttcctctacagcaagctcaccgtggacaagagcaggtggcagcaggggaacgtcttctcatgctccgtgatgcatgaggctctgcacaaccactacacgcagaagagcctctccctgtctccgggtaaa

SEQ ID NO: 245 - protein, 11 aa, Artificial Sequence
  Description of Artificial Sequence: Synthetic peptide
KASQNINNYLN

SEQ ID NO: 246 - protein, 7 aa, Artificial Sequence
  Description of Artificial Sequence: Synthetic peptide
NTDHLQA

SEQ ID NO: 247 - protein, 8 aa, Artificial Sequence
  Description of Artificial Sequence: Synthetic peptide
LQHRSRYT

SEQ ID NO: 248 - protein, 11 aa, Artificial Sequence
  Description of Artificial Sequence: Synthetic peptide
KASQNINNYLN

SEQ ID NO: 249 - protein, 7 aa, Artificial Sequence
  Description of Artificial Sequence: Synthetic peptide
NTDHLQA

SEQ ID NO: 250 - protein, 8 aa, Artificial Sequence
  Description of Artificial Sequence: Synthetic peptide
LQHRSRYT

SEQ ID NO: 251 - protein, 7 aa, Artificial Sequence
  Description of Artificial Sequence: Synthetic peptide
SQNINNY

SEQ ID NO: 252 - protein, 3 aa, Artificial Sequence
  Description of Artificial Sequence: Synthetic peptide
NTD

SEQ ID NO: 253 - protein, 5 aa, Artificial Sequence
  Description of Artificial Sequence: Synthetic peptide
HRSRY

SEQ ID NO: 254 - protein, 6 aa, Artificial Sequence
  Description of Artificial Sequence: Synthetic peptide
QNINNY

SEQ ID NO: 255 - protein, 10 aa, Artificial Sequence
  Description of Artificial Sequence: Synthetic peptide
NTDHLQAGVP

SEQ ID NO: 256 - protein, 8 aa, Artificial Sequence
  Description of Artificial Sequence: Synthetic peptide
LQHRSRYT

SEQ ID NO: 257 - protein, 106 aa, Artificial Sequence
  Description of Artificial Sequence: Synthetic polypeptide
DIQMTQSPSSLSASVGDRVTITCKASQNINNYLNWYQQKPGKAPKLLIYNTDHLQAGVPSRFSGSGSGTDFTLTISSLQPEDFATYYCLQHRSRYTFGPGTKVDIK

SEQ ID NO: 258 - DNA, 318 bp, Artificial Sequence
  Description of Artificial Sequence: Synthetic polynucleotide
gacatccagatgacccagagccctagctccctgtccgcctctgtgggcgatagggtgaccatcacatgcaaggcctcccagaacatcaacaattacctgaattggtatcagcagaagcccggcaaggcccctaagctgctgatctacaacacagaccacctgcaggcaggagtgccatctcggttcagcggctccggctctggaaccgactttaccctgacaatctctagcctgcagccagaggatttcgccacatactattgtctgcagcaccggagcagatatacctttggccccggcacaaaggtggatatcaag

SEQ ID NO: 259 - protein, 213 aa, Artificial Sequence
  Description of Artificial Sequence: Synthetic polypeptide
DIQMTQSPSSLSASVGDRVTITCKASQNINNYLNWYQQKPGKAPKLLIYNTDHLQAGVPSRFSGSGSGTDFTLTISSLQPEDFATYYCLQHRSRYTFGPGTKVDIKRTVAAPSVFIFPPSDEQLKSGTASVVCLLNNFYPREAKVQWKVDNALQSGNSQESVTEQDSKDSTYSLSSTLTLSKADYEKHKVYACEVTHQGLSSPVTKSFNRGEC

SEQ ID NO: 260 - DNA, 639 bp, Artificial Sequence
  Description of Artificial Sequence: Synthetic polynucleotide
gacatccagatgacccagagccctagctccctgtccgcctctgtgggcgatagggtgaccatcacatgcaaggcctcccagaacatcaacaattacctgaattggtatcagcagaagcccggcaaggcccctaagctgctgatctacaacacagaccacctgcaggcaggagtgccatctcggttcagcggctccggctctggaaccgactttaccctgacaatctctagcctgcagccagaggatttcgccacatactattgtctgcagcaccggagcagatatacctttggccccggcacaaaggtggatatcaagcgtacggtggctgcaccatctgtcttcatcttcccgccatctgatgagcagttgaaatctggaactgcctctgttgtgtgcctgctgaataacttctatccccgcgaggccaaagtacagtggaaggtggataacgccctccaatcgggtaactcccaggagagtgtcacagagcaggacagcaaggacagcacctacagcctcagcagcaccctgacgctgagcaaagcagactacgagaaacacaaagtctacgcctgcgaagtcacccatcagggcctgagctcgcccgtcacaaagagcttcaaccgcggagagtgt

SEQ ID NO: 261 - protein, 10 aa, Artificial Sequence
  Description of Artificial Sequence: Synthetic peptide
GYTFTSYYIY

SEQ ID NO: 262 - protein, 17 aa, Artificial Sequence
  Description of Artificial Sequence: Synthetic peptide
YIYPANGGIYYSEKFKG

SEQ ID NO: 263 - protein, 10 aa, Artificial Sequence
  Description of Artificial Sequence: Synthetic peptide
PVTMMAPLVF

SEQ ID NO: 264 - protein, 5 aa, Artificial Sequence
  Description of Artificial Sequence: Synthetic peptide
SYYIY

SEQ ID NO: 265 - protein, 17 aa, Artificial Sequence
  Description of Artificial Sequence: Synthetic peptide
YIYPANGGIYYSEKFKG

SEQ ID NO: 266 - protein, 10 aa, Artificial Sequence
  Description of Artificial Sequence: Synthetic peptide
PVTMMAPLVF

SEQ ID NO: 267 - protein, 7 aa, Artificial Sequence
  Description of Artificial Sequence: Synthetic peptide
GYTFTSY

SEQ ID NO: 268 - protein, 6 aa, Artificial Sequence
  Description of Artificial Sequence: Synthetic peptide
YPANGG

SEQ ID NO: 269 - protein, 10 aa, Artificial Sequence
  Description of Artificial Sequence: Synthetic peptide
PVTMMAPLVF

SEQ ID NO: 270 - protein, 8 aa, Artificial Sequence
  Description of Artificial Sequence: Synthetic peptide
GYTFTSYY

SEQ ID NO: 271 - protein, 8 aa, Artificial Sequence
  Description of Artificial Sequence: Synthetic peptide
IYPANGGI

SEQ ID NO: 272 - protein, 12 aa, Artificial Sequence
  Description of Artificial Sequence: Synthetic peptide
ARPVTMMAPLVF

SEQ ID NO: 273 - protein, 119 aa, Artificial Sequence
  Description of Artificial Sequence: Synthetic polypeptide
QVQLVQSGAEVKKPGASVKVSCKASGYTFTSYYIYWVRQAPGQRLEWMGYIYPANGGIYYSEKFKGRVTITADTSAGTAYMELSSLRSEDTAVYYCARPVTMMAPLVFWGQGTLVTVSS

SEQ ID NO: 274 - DNA, 357 bp, Artificial Sequence
  Description of Artificial Sequence: Synthetic polynucleotide
caggtgcagctggtgcagagcggagcagaggtgaagaagccaggagcctccgtgaaggtgtcttgcaaggccagcggctacaccttcacatcctactatatctattgggtgcggcaggcaccaggacagagactggagtggatgggctacatctatcccgccaacggcggcatctactattctgagaagtttaagggccgggtgaccatcacagccgacacctccgccggcacagcctacatggagctgagctccctgaggtctgaggataccgccgtgtactattgtgcccgccccgtgacaatgatggcacctctggtgttctggggacagggcaccctggtgacagtgtctagc

SEQ ID NO: 275 - protein, 449 aa, Artificial Sequence
  Description of Artificial Sequence: Synthetic polypeptide
QVQLVQSGAEVKKPGASVKVSCKASGYTFTSYYIYWVRQAPGQRLEWMGYIYPANGGIYYSEKFKGRVTITADTSAGTAYMELSSLRSEDTAVYYCARPVTMMAPLVFWGQGTLVTVSSASTKGPSVFPLAPSSKSTSGGTAALGCLVKDYFPEPVTVSWNSGALTSGVHTFPAVLQSSGLYSLSSVVTVPSSSLGTQTYICNVNHKPSNTKVDKRVEPKSCDKTHTCPPCPAPEAAGGPSVFLFPPKPKDTLMISRTPEVTCVVVDVSHEDPEVKFNWYVDGVEVHNAKTKPREEQYNSTYRVVSVLTVLHQDWLNGKEYKCKVSNKALPAPIEKTISKAKGQPREPQVYTLPPSREEMTKNQVSLTCLVKGFYPSDIAVEWESNGQPENNYKTTPPVLDSDGSFFLYSKLTVDKSRWQQGNVFSCSVMHEALHNHYTQKSLSLSPGK

SEQ ID NO: 276 - DNA, 1347 bp, Artificial Sequence
  Description of Artificial Sequence: Synthetic polynucleotide
caggtgcagctggtgcagagcggagcagaggtgaagaagccaggagcctccgtgaaggtgtcttgcaaggccagcggctacaccttcacatcctactatatctattgggtgcggcaggcaccaggacagagactggagtggatgggctacatctatcccgccaacggcggcatctactattctgagaagtttaagggccgggtgaccatcacagccgacacctccgccggcacagcctacatggagctgagctccctgaggtctgaggataccgccgtgtactattgtgcccgccccgtgacaatgatggcacctctggtgttctggggacagggcaccctggtgacagtgtctagcgctagcaccaagggcccatcggtcttccccctggcaccctcctccaagagcacctctgggggcacagcggccctgggctgcctggtcaaggactacttccccgaaccggtgacggtgtcgtggaactcaggcgccctgaccagcggcgtgcacaccttcccggctgtcctacagtcctcaggactctactccctcagcagcgtggtgaccgtgccctccagcagcttgggcacccagacctacatctgcaacgtgaatcacaagcccagcaacaccaaggtggacaagagagttgagcccaaatcttgtgacaaaactcacacatgcccaccgtgcccagcacctgaagccgctgggggaccgtcagtcttcctcttccccccaaaacccaaggacaccctcatgatctcccggacccctgaggtcacatgcgtggtggtggacgtgagccacgaagaccctgaggtcaagttcaactggtacgtggacggcgtggaggtgcataatgccaagacaaagccgcgggaggagcagtacaacagcacgtaccgtgtggtcagcgtcctcaccgtcctgcaccaggactggctgaatggcaaggagtacaagtgcaaggtctccaacaaagccctcccagcccccatcgagaaaaccatctccaaagccaaagggcagccccgagaaccacaggtgtacaccctgcccccatcccgggaggagatgaccaagaaccaggtcagcctgacctgcctggtcaaaggcttctatcccagcgacatcgccgtggagtgggagagcaatgggcagccggagaacaactacaagaccacgcctcccgtgctggactccgacggctccttcttcctctacagcaagctcaccgtggacaagagcaggtggcagcaggggaacgtcttctcatgctccgtgatgcatgaggctctgcacaaccactacacgcagaagagcctctccctgtctccgggtaaa

SEQ ID NO: 277 - protein, 16 aa, Artificial Sequence
  Description of Artificial Sequence: Synthetic peptide
RSSQSLVYSHGNTYLH

SEQ ID NO: 278 - protein, 7 aa, Artificial Sequence
  Description of Artificial Sequence: Synthetic peptide
RVSNRFS

SEQ ID NO: 279 - protein, 9 aa, Artificial Sequence
  Description of Artificial Sequence: Synthetic peptide
FQSTHLPYT

SEQ ID NO: 280 - protein, 16 aa, Artificial Sequence
  Description of Artificial Sequence: Synthetic peptide
RSSQSLVYSHGNTYLH

SEQ ID NO: 281 - protein, 7 aa, Artificial Sequence
  Description of Artificial Sequence: Synthetic peptide
RVSNRFS

SEQ ID NO: 282 - protein, 9 aa, Artificial Sequence
  Description of Artificial Sequence: Synthetic peptide
FQSTHLPYT

SEQ ID NO: 283 - protein, 12 aa, Artificial Sequence
  Description of Artificial Sequence: Synthetic peptide
SQSLVYSHGNTY

SEQ ID NO: 284 - protein, 3 aa, Artificial Sequence
  Description of Artificial Sequence: Synthetic peptide
RVS

SEQ ID NO: 285 - protein, 6 aa, Artificial Sequence
  Description of Artificial Sequence: Synthetic peptide
STHLPY

SEQ ID NO: 286 - protein, 11 aa, Artificial Sequence
  Description of Artificial Sequence: Synthetic peptide
QSLVYSHGNTY

SEQ ID NO: 287 - protein, 3 aa, Artificial Sequence
  Description of Artificial Sequence: Synthetic peptide
RVS

SEQ ID NO: 288 - protein, 9 aa, Artificial Sequence
  Description of Artificial Sequence: Synthetic peptide
FQSTHLPYT

SEQ ID NO: 289 - protein, 112 aa, Artificial Sequence
  Description of Artificial Sequence: Synthetic polypeptide
DVVMTQSPLSLPVTLGQPASISCRSSQSLVYSHGNTYLHWYQQRPGQSPRLLIYRVSNRFSGVPDRFSGSGSGTDFTLKISRVEAEDVGVYYCFQSTHLPYTFGQGTKLEIK

SEQ ID NO: 290 - DNA, 336 bp, Artificial Sequence
  Description of Artificial Sequence: Synthetic polynucleotide
gacgtggtcatgacacagtccccactgtctctgcctgtgaccctgggacagccagcctctatcagctgccggagctcccagagcctggtgtactcccacggcaacacatacctgcactggtatcagcagaggccaggacagtccccaaggctgctgatctatcgggtgtctaatagattcagcggcgtgcctgaccggttttccggctctggcagcggcaccgatttcacactgaagatctccagggtggaggccgaggatgtgggcgtgtactattgtttccagtctacccacctgccatacacatttggccagggcaccaagctggagatcaag

SEQ ID NO: 291 - protein, 219 aa, Artificial Sequence
  Description of Artificial Sequence: Synthetic polypeptide
DVVMTQSPLSLPVTLGQPASISCRSSQSLVYSHGNTYLHWYQQRPGQSPRLLIYRVSNRFSGVPDRFSGSGSGTDFTLKISRVEAEDVGVYYCFQSTHLPYTFGQGTKLEIKRTVAAPSVFIFPPSDEQLKSGTASVVCLLNNFYPREAKVQWKVDNALQSGNSQESVTEQDSKDSTYSLSSTLTLSKADYEKHKVYACEVTHQGLSSPVTKSFNRGEC

SEQ ID NO: 292 - DNA, 657 bp, Artificial Sequence
  Description of Artificial Sequence: Synthetic polynucleotide
gacgtggtcatgacacagtccccactgtctctgcctgtgaccctgggacagccagcctctatcagctgccggagctcccagagcctggtgtactcccacggcaacacatacctgcactggtatcagcagaggccaggacagtccccaaggctgctgatctatcgggtgtctaatagattcagcggcgtgcctgaccggttttccggctctggcagcggcaccgatttcacactgaagatctccagggtggaggccgaggatgtgggcgtgtactattgtttccagtctacccacctgccatacacatttggccagggcaccaagctggagatcaagcgtacggtggctgcaccatctgtcttcatcttcccgccatctgatgagcagttgaaatctggaactgcctctgttgtgtgcctgctgaataacttctatccccgcgaggccaaagtacagtggaaggtggataacgccctccaatcgggtaactcccaggagagtgtcacagagcaggacagcaaggacagcacctacagcctcagcagcaccctgacgctgagcaaagcagactacgagaaacacaaagtctacgcctgcgaagtcacccatcagggcctgagctcgcccgtcacaaagagcttcaaccgcggagagtgt

SEQ ID NO: 293 - protein, 10 aa, Artificial Sequence
  Description of Artificial Sequence: Synthetic peptide
GYTFTSYYIY

SEQ ID NO: 294 - protein, 17 aa, Artificial Sequence
  Description of Artificial Sequence: Synthetic peptide
YIYPANGGIYYSEKFKG

SEQ ID NO: 295 - protein, 10 aa, Artificial Sequence
  Description of Artificial Sequence: Synthetic peptide
PVTMMAPLVF

SEQ ID NO: 296 - protein, 5 aa, Artificial Sequence
  Description of Artificial Sequence: Synthetic peptide
SYYIY

SEQ ID NO: 297 - protein, 17 aa, Artificial Sequence
  Description of Artificial Sequence: Synthetic peptide
YIYPANGGIYYSEKFKG

SEQ ID NO: 298 - protein, 10 aa, Artificial Sequence
  Description of Artificial Sequence: Synthetic peptide
PVTMMAPLVF

SEQ ID NO: 299 - protein, 7 aa, Artificial Sequence
  Description of Artificial Sequence: Synthetic peptide
GYTFTSY

SEQ ID NO: 300 - protein, 6 aa, Artificial Sequence
  Description of Artificial Sequence: Synthetic peptide
YPANGG

SEQ ID NO: 301 - protein, 10 aa, Artificial Sequence
  Description of Artificial Sequence: Synthetic peptide
PVTMMAPLVF

SEQ ID NO: 302 - protein, 8 aa, Artificial Sequence
  Description of Artificial Sequence: Synthetic peptide
GYTFTSYY

SEQ ID NO: 303 - protein, 8 aa, Artificial Sequence
  Description of Artificial Sequence: Synthetic peptide
IYPANGGI

SEQ ID NO: 304 - protein, 12 aa, Artificial Sequence
  Description of Artificial Sequence: Synthetic peptide
ARPVTMMAPLVF

SEQ ID NO: 305 - protein, 119 aa, Artificial Sequence
  Description of Artificial Sequence: Synthetic polypeptide
QVQLVQSGAEVKKPGASVKVSCKASGYTFTSYYIYWVRQAPGQRLEWMGYIYPANGGIYYSEKFKGRVTITRDTSASTAYMELSSLRSEDTAVYYCARPVTMMAPLVFWGQGTLVTVSS

SEQ ID NO: 306 - DNA, 357 bp, Artificial Sequence
  Description of Artificial Sequence: Synthetic polynucleotide
caggtgcagctggtgcagagcggagcagaggtgaagaagccaggagccagcgtgaaggtgtcctgcaaggcctctggctacaccttcacatcctactatatctattgggtgaggcaggcaccaggacagcgcctggagtggatgggctacatctatcccgccaacggcggcatctactattctgagaagtttaagggccgggtgaccatcacaagagacacctccgcctctacagcctacatggagctgagctccctgcggagcgaggataccgccgtgtactattgtgccaggcccgtgacaatgatggcacctctggtgttctggggacagggcaccctggtgacagtgtctagc

SEQ ID NO: 307 - protein, 449 aa, Artificial Sequence
  Description of Artificial Sequence: Synthetic polypeptide
QVQLVQSGAEVKKPGASVKVSCKASGYTFTSYYIYWVRQAPGQRLEWMGYIYPANGGIYYSEKFKGRVTITRDTSASTAYMELSSLRSEDTAVYYCARPVTMMAPLVFWGQGTLVTVSSASTKGPSVFPLAPSSKSTSGGTAALGCLVKDYFPEPVTVSWNSGALTSGVHTFPAVLQSSGLYSLSSVVTVPSSSLGTQTYICNVNHKPSNTKVDKRVEPKSCDKTHTCPPCPAPEAAGGPSVFLFPPKPKDTLMISRTPEVTCVVVDVSHEDPEVKFNWYVDGVEVHNAKTKPREEQYNSTYRVVSVLTVLHQDWLNGKEYKCKVSNKALPAPIEKTISKAKGQPREPQVYTLPPSREEMTKNQVSLTCLVKGFYPSDIAVEWESNGQPENNYKTTPPVLDSDGSFFLYSKLTVDKSRWQQGNVFSCSVMHEALHNHYTQKSLSLSPGK

SEQ ID NO: 308 - DNA, 1347 bp, Artificial Sequence
  Description of Artificial Sequence: Synthetic polynucleotide
caggtgcagctggtgcagagcggagcagaggtgaagaagccaggagccagcgtgaaggtgtcctgcaaggcctctggctacaccttcacatcctactatatctattgggtgaggcaggcaccaggacagcgcctggagtggatgggctacatctatcccgccaacggcggcatctactattctgagaagtttaagggccgggtgaccatcacaagagacacctccgcctctacagcctacatggagctgagctccctgcggagcgaggataccgccgtgtactattgtgccaggcccgtgacaatgatggcacctctggtgttctggggacagggcaccctggtgacagtgtctagcgctagcaccaagggcccatcggtcttccccctggcaccctcctccaagagcacctctgggggcacagcggccctgggctgcctggtcaaggactacttccccgaaccggtgacggtgtcgtggaactcaggcgccctgaccagcggcgtgcacaccttcccggctgtcctacagtcctcaggactctactccctcagcagcgtggtgaccgtgccctccagcagcttgggcacccagacctacatctgcaacgtgaatcacaagcccagcaacaccaaggtggacaagagagttgagcccaaatcttgtgacaaaactcacacatgcccaccgtgcccagcacctgaagccgctgggggaccgtcagtcttcctcttccccccaaaacccaaggacaccctcatgatctcccggacccctgaggtcacatgcgtggtggtggacgtgagccacgaagaccctgaggtcaagttcaactggtacgtggacggcgtggaggtgcataatgccaagacaaagccgcgggaggagcagtacaacagcacgtaccgtgtggtcagcgtcctcaccgtcctgcaccaggactggctgaatggcaaggagtacaagtgcaaggtctccaacaaagccctcccagcccccatcgagaaaaccatctccaaagccaaagggcagccccgagaaccacaggtgtacaccctgcccccatcccgggaggagatgaccaagaaccaggtcagcctgacctgcctggtcaaaggcttctatcccagcgacatcgccgtggagtgggagagcaatgggcagccggagaacaactacaagaccacgcctcccgtgctggactccgacggctccttcttcctctacagcaagctcaccgtggacaagagcaggtggcagcaggggaacgtcttctcatgctccgtgatgcatgaggctctgcacaaccactacacgcagaagagcctctccctgtctccgggtaaa

SEQ ID NO: 309 - protein, 16 aa, Artificial Sequence
  Description of Artificial Sequence: Synthetic peptide
RSSQSLVYSHGNTYLH

SEQ ID NO: 310 - protein, 7 aa, Artificial Sequence
  Description of Artificial Sequence: Synthetic peptide
RVSNRFS

SEQ ID NO: 311 - protein, 9 aa, Artificial Sequence
  Description of Artificial Sequence: Synthetic peptide
FQSTHLPYT

SEQ ID NO: 312 - protein, 16 aa, Artificial Sequence
  Description of Artificial Sequence: Synthetic peptide
RSSQSLVYSHGNTYLH

SEQ ID NO: 313 - protein, 7 aa, Artificial Sequence
  Description of Artificial Sequence: Synthetic peptide
RVSNRFS

SEQ ID NO: 314 - protein, 9 aa, Artificial Sequence
  Description of Artificial Sequence: Synthetic peptide
FQSTHLPYT

SEQ ID NO: 315 - protein, 12 aa, Artificial Sequence
  Description of Artificial Sequence: Synthetic peptide
SQSLVYSHGNTY

SEQ ID NO: 316 - protein, 3 aa, Artificial Sequence
  Description of Artificial Sequence: Synthetic peptide
RVS

SEQ ID NO: 317 - protein, 6 aa, Artificial Sequence
  Description of Artificial Sequence: Synthetic peptide
STHLPY

SEQ ID NO: 318 - protein, 11 aa, Artificial Sequence
  Description of Artificial Sequence: Synthetic peptide
QSLVYSHGNTY

SEQ ID NO: 319 - protein, 3 aa, Artificial Sequence
  Description of Artificial Sequence: Synthetic peptide
RVS

SEQ ID NO: 320 - protein, 9 aa, Artificial Sequence
  Description of Artificial Sequence: Synthetic peptide
FQSTHLPYT

SEQ ID NO: 321 - protein, 112 aa, Artificial Sequence
  Description of Artificial Sequence: Synthetic polypeptide
DVVMTQSPLSLPVTLGQPASISCRSSQSLVYSHGNTYLHWFQQRPGQSPRRLIYRVSNRFSGVPDRFSGSGSGTDFTLKISRVEAEDVGVYYCFQSTHLPYTFGQGTKLEIK

SEQ ID NO: 322 - DNA, 336 bp, Artificial Sequence
  Description of Artificial Sequence: Synthetic polynucleotide
gacgtggtcatgacacagtccccactgtctctgcctgtgaccctgggacagccagcctctatcagctgcaggagctcccagagcctggtgtactcccacggcaacacatatctgcactggttccagcagagaccaggacagtccccacggagactgatctacagggtgtctaatcgcttcagcggcgtgcctgaccggttttccggctctggcagcggaaccgacttcaccctgaagatctccagagtggaggccgaggatgtgggcgtgtactattgtttccagtctacccacctgccatatacatttggccagggcaccaagctggagatcaag

SEQ ID NO: 323 - protein, 219 aa, Artificial Sequence
  Description of Artificial Sequence: Synthetic polypeptide
DVVMTQSPLSLPVTLGQPASISCRSSQSLVYSHGNTYLHWFQQRPGQSPRRLIYRVSNRFSGVPDRFSGSGSGTDFTLKISRVEAEDVGVYYCFQSTHLPYTFGQGTKLEIKRTVAAPSVFIFPPSDEQLKSGTASVVCLLNNFYPREAKVQWKVDNALQSGNSQESVTEQDSKDSTYSLSSTLTLSKADYEKHKVYACEVTHQGLSSPVTKSFNRGEC

SEQ ID NO: 324 - DNA, 657 bp, Artificial Sequence
  Description of Artificial Sequence: Synthetic polynucleotide
gacgtggtcatgacacagtccccactgtctctgcctgtgaccctgggacagccagcctctatcagctgcaggagctcccagagcctggtgtactcccacggcaacacatatctgcactggttccagcagagaccaggacagtccccacggagactgatctacagggtgtctaatcgcttcagcggcgtgcctgaccggttttccggctctggcagcggaaccgacttcaccctgaagatctccagagtggaggccgaggatgtgggcgtgtactattgtttccagtctacccacctgccatatacatttggccagggcaccaagctggagatcaagcgtacggtggctgcaccatctgtcttcatcttcccgccatctgatgagcagttgaaatctggaactgcctctgttgtgtgcctgctgaataacttctatccccgcgaggccaaagtacagtggaaggtggataacgccctccaatcgggtaactcccaggagagtgtcacagagcaggacagcaaggacagcacctacagcctcagcagcaccctgacgctgagcaaagcagactacgagaaacacaaagtctacgcctgcgaagtcacccatcagggcctgagctcgcccgtcacaaagagcttcaaccgcggagagtgt

SEQ ID NO: 325 - protein, 10 aa, Artificial Sequence
  Description of Artificial Sequence: Synthetic peptide
GFTFSKNGMH

SEQ ID NO: 326 - protein, 17 aa, Artificial Sequence
  Description of Artificial Sequence: Synthetic peptide
MIYYDSSRMYYADTVKG

SEQ ID NO: 327 - protein, 9 aa, Artificial Sequence
  Description of Artificial Sequence: Synthetic peptide
FWWDLDFDY

SEQ ID NO: 328 - protein, 5 aa, Artificial Sequence
  Description of Artificial Sequence: Synthetic peptide
KNGMH

SEQ ID NO: 329 - protein, 17 aa, Artificial Sequence
  Description of Artificial Sequence: Synthetic peptide
MIYYDSSRMYYADTVKG

SEQ ID NO: 330 - protein, 9 aa, Artificial Sequence
  Description of Artificial Sequence: Synthetic peptide
FWWDLDFDY

SEQ ID NO: 331 - protein, 7 aa, Artificial Sequence
  Description of Artificial Sequence: Synthetic peptide
GFTFSKN

SEQ ID NO: 332 - protein, 6 aa, Artificial Sequence
  Description of Artificial Sequence: Synthetic peptide
YYDSSR

SEQ ID NO: 333 - protein, 9 aa, Artificial Sequence
  Description of Artificial Sequence: Synthetic peptide
FWWDLDFDY

SEQ ID NO: 334 - protein, 8 aa, Artificial Sequence
  Description of Artificial Sequence: Synthetic peptide
GFTFSKNG

SEQ ID NO: 335 - protein, 8 aa, Artificial Sequence
  Description of Artificial Sequence: Synthetic peptide
IYYDSSRM

SEQ ID NO: 336 - protein, 11 aa, Artificial Sequence
  Description of Artificial Sequence: Synthetic peptide
ASFWWDLDFDY

SEQ ID NO: 337 - protein, 118 aa, Artificial Sequence
  Description of Artificial Sequence: Synthetic polypeptide
QVQLVESGGGVVQPGRSLRLSCAASGFTFSKNGMHWVRQAPGKGLEWVAMIYYDSSRMYYADTVKGRFTISRDNSKNTLYLQMNSLRAEDTAVYYCASFWWDLDFDYWGQGTMVTVSS

SEQ ID NO: 338 - DNA, 353 bp, Artificial Sequence
  Description of Artificial Sequence: Synthetic polynucleotide
aggtgcagctggtggagtctggaggaggagtggtgcagccaggccggtccctgagactgtcttgcgccgccagcggcttcacctttagcaagaacggaatgcactgggtgcggcaggcacctggcaagggactggagtgggtggccatgatctactatgatagctccaggatgtactatgccgacaccgtgaagggcaggttcacaatctcccgcgataactctaagaataccctgtacctgcagatgaatagcctgcgggccgaggacacagccgtgtactattgtgcctccttctggtgggacctggattttgactattggggccagggcaccatggtgacagtgtctagc

SEQ ID NO: 339 - protein, 448 aa, Artificial Sequence
  Description of Artificial Sequence: Synthetic polypeptide
QVQLVESGGGVVQPGRSLRLSCAASGFTFSKNGMHWVRQAPGKGLEWVAMIYYDSSRMYYADTVKGRFTISRDNSKNTLYLQMNSLRAEDTAVYYCASFWWDLDFDYWGQGTMVTVSSASTKGPSVFPLAPSSKSTSGGTAALGCLVKDYFPEPVTVSWNSGALTSGVHTFPAVLQSSGLYSLSSVVTVPSSSLGTQTYICNVNHKPSNTKVDKRVEPKSCDKTHTCPPCPAPEAAGGPSVFLFPPKPKDTLMISRTPEVTCVVVDVSHEDPEVKFNWYVDGVEVHNAKTKPREEQYNSTYRVVSVLTVLHQDWLNGKEYKCKVSNKALPAPIEKTISKAKGQPREPQVYTLPPSREEMTKNQVSLTCLVKGFYPSDIAVEWESNGQPENNYKTTPPVLDSDGSFFLYSKLTVDKSRWQQGNVFSCSVMHEALHNHYTQKSLSLSPGK

SEQ ID NO: 340 - DNA, 1343 bp, Artificial Sequence
  Description of Artificial Sequence: Synthetic polynucleotide
aggtgcagctggtggagtctggaggaggagtggtgcagccaggccggtccctgagactgtcttgcgccgccagcggcttcacctttagcaagaacggaatgcactgggtgcggcaggcacctggcaagggactggagtgggtggccatgatctactatgatagctccaggatgtactatgccgacaccgtgaagggcaggttcacaatctcccgcgataactctaagaataccctgtacctgcagatgaatagcctgcgggccgaggacacagccgtgtactattgtgcctccttctggtgggacctggattttgactattggggccagggcaccatggtgacagtgtctagcgctagcaccaagggcccatcggtcttccccctggcaccctcctccaagagcacctctgggggcacagcggccctgggctgcctggtcaaggactacttccccgaaccggtgacggtgtcgtggaactcaggcgccctgaccagcggcgtgcacaccttcccggctgtcctacagtcctcaggactctactccctcagcagcgtggtgaccgtgccctccagcagcttgggcacccagacctacatctgcaacgtgaatcacaagcccagcaacaccaaggtggacaagagagttgagcccaaatcttgtgacaaaactcacacatgcccaccgtgcccagcacctgaagccgctgggggaccgtcagtcttcctcttccccccaaaacccaaggacaccctcatgatctcccggacccctgaggtcacatgcgtggtggtggacgtgagccacgaagaccctgaggtcaagttcaactggtacgtggacggcgtggaggtgcataatgccaagacaaagccgcgggaggagcagtacaacagcacgtaccgtgtggtcagcgtcctcaccgtcctgcaccaggactggctgaatggcaaggagtacaagtgcaaggtctccaacaaagccctcccagcccccatcgagaaaaccatctccaaagccaaagggcagccccgagaaccacaggtgtacaccctgcccccatcccgggaggagatgaccaagaaccaggtcagcctgacctgcctggtcaaaggcttctatcccagcgacatcgccgtggagtgggagagcaatgggcagccggagaacaactacaagaccacgcctcccgtgctggactccgacggctccttcttcctctacagcaagctcaccgtggacaagagcaggtggcagcaggggaacgtcttctcatgctccgtgatgcatgaggctctgcacaaccactacacgcagaagagcctctccctgtctccgggtaaa

SEQ ID NO: 341 - protein, 16 aa, Artificial Sequence
  Description of Artificial Sequence: Synthetic peptide
RSSQSLVRSDGTTYFN

SEQ ID NO: 342 - protein, 7 aa, Artificial Sequence
  Description of Artificial Sequence: Synthetic peptide
RVSNRFS

SEQ ID NO: 343 - protein, 9 aa, Artificial Sequence
  Description of Artificial Sequence: Synthetic peptide
LQSSHFPWT

SEQ ID NO: 344 - protein, 16 aa, Artificial Sequence
  Description of Artificial Sequence: Synthetic peptide
RSSQSLVRSDGTTYFN

SEQ ID NO: 345 - protein, 7 aa, Artificial Sequence
  Description of Artificial Sequence: Synthetic peptide
RVSNRFS

SEQ ID NO: 346 - protein, 9 aa, Artificial Sequence
  Description of Artificial Sequence: Synthetic peptide
LQSSHFPWT

SEQ ID NO: 347 - protein, 12 aa, Artificial Sequence
  Description of Artificial Sequence: Synthetic peptide
SQSLVRSDGTTY

SEQ ID NO: 348 - protein, 3 aa, Artificial Sequence
  Description of Artificial Sequence: Synthetic peptide
RVS

SEQ ID NO: 349 - protein, 6 aa, Artificial Sequence
  Description of Artificial Sequence: Synthetic peptide
SSHFPW

SEQ ID NO: 350 - protein, 11 aa, Artificial Sequence
  Description of Artificial Sequence: Synthetic peptide
QSLVRSDGTTY

SEQ ID NO: 351 - protein, 3 aa, Artificial Sequence
  Description of Artificial Sequence: Synthetic peptide
RVS

SEQ ID NO: 352 - protein, 9 aa, Artificial Sequence
  Description of Artificial Sequence: Synthetic peptide
LQSSHFPWT

SEQ ID NO: 353 - protein, 112 aa, Artificial Sequence; identical to SEQ ID NO: 161
  Description of Artificial Sequence: Synthetic polypeptide

SEQ ID NO: 354 - DNA, 336 bp, Artificial Sequence; identical to SEQ ID NO: 162
  Description of Artificial Sequence: Synthetic polynucleotide

SEQ ID NO: 355 - protein, 219 aa, Artificial Sequence; identical to SEQ ID NO: 163
  Description of Artificial Sequence: Synthetic polypeptide

SEQ ID NO: 356 - DNA, 657 bp, Artificial Sequence; identical to SEQ ID NO: 164
  Description of Artificial Sequence: Synthetic polynucleotide

SEQ ID NO: 357 - protein, 10 aa, Artificial Sequence
  Description of Artificial Sequence: Synthetic peptide
GFSLTTYNIH

SEQ ID NO: 358 - protein, 16 aa, Artificial Sequence
  Description of Artificial Sequence: Synthetic peptide
RMRYSGDTSYSSALKS

SEQ ID NO: 359 - protein, 15 aa, Artificial Sequence
  Description of Artificial Sequence: Synthetic peptide
DPMYIPGYSYGVMNA

SEQ ID NO: 360 - protein, 5 aa, Artificial Sequence
  Description of Artificial Sequence: Synthetic peptide
TYNIH

SEQ ID NO: 361 - protein, 16 aa, Artificial Sequence
  Description of Artificial Sequence: Synthetic peptide
RMRYSGDTSYSSALKS

SEQ ID NO: 362 - protein, 15 aa, Artificial Sequence
  Description of Artificial Sequence: Synthetic peptide
DPMYIPGYSYGVMNA

SEQ ID NO: 363 - protein, 7 aa, Artificial Sequence
  Description of Artificial Sequence: Synthetic peptide
GFSLTTY

SEQ ID NO: 364 - protein, 5 aa, Artificial Sequence
  Description of Artificial Sequence: Synthetic peptide
RYSGD

SEQ ID NO: 365 - protein, 15 aa, Artificial Sequence
  Description of Artificial Sequence: Synthetic peptide
DPMYIPGYSYGVMNA

SEQ ID NO: 366 - protein, 8 aa, Artificial Sequence
  Description of Artificial Sequence: Synthetic peptide
GFSLTTYN

SEQ ID NO: 367 - protein, 7 aa, Artificial Sequence
  Description of Artificial Sequence: Synthetic peptide
MRYSGDT

SEQ ID NO: 368 - protein, 17 aa, Artificial Sequence
  Description of Artificial Sequence: Synthetic peptide
TRDPMYIPGYSYGVMNA

SEQ ID NO: 369 - protein, 123 aa, Artificial Sequence
  Description of Artificial Sequence: Synthetic polypeptide
QVQLQESGPGLVKPSETLSLTCTVSGFSLTTYNIHWIRQPPGKGLEWIGRMRYSGDTSYSSALKSRVTISRDTSKNQVSLKLSSVTAADTAVYYCTRDPMYIPGYSYGVMNAWGQGTTVTVSS

SEQ ID NO: 370 - DNA, 369 bp, Artificial Sequence
  Description of Artificial Sequence: Synthetic polynucleotide
caggtgcagctgcaggagtccggacctggactggtgaagccatctgagaccctgagcctgacctgcacagtgagcggcttctccctgaccacatacaacatccactggatcagacagccacctggcaagggactggagtggatcggccggatgagatactccggcgacacatcttatagctccgccctgaagtctagggtgaccatcagccgcgatacatccaagaaccaggtgagcctgaagctgtctagcgtgaccgccgccgacacagccgtgtactattgtacccgggaccccatgtatatccccggctactcttatggcgtgatgaatgcctggggccagggcaccacagtgacagtgtcctct

SEQ ID NO: 371 - protein, 453 aa, Artificial Sequence
  Description of Artificial Sequence: Synthetic polypeptide
QVQLQESGPGLVKPSETLSLTCTVSGFSLTTYNIHWIRQPPGKGLEWIGRMRYSGDTSYSSALKSRVTISRDTSKNQVSLKLSSVTAADTAVYYCTRDPMYIPGYSYGVMNAWGQGTTVTVSSASTKGPSVFPLAPSSKSTSGGTAALGCLVKDYFPEPVTVSWNSGALTSGVHTFPAVLQSSGLYSLSSVVTVPSSSLGTQTYICNVNHKPSNTKVDKRVEPKSCDKTHTCPPCPAPEAAGGPSVFLFPPKPKDTLMISRTPEVTCVVVDVSHEDPEVKFNWYVDGVEVHNAKTKPREEQYNSTYRVVSVLTVLHQDWLNGKEYKCKVSNKALPAPIEKTISKAKGQPREPQVYTLPPSREEMTKNQVSLTCLVKGFYPSDIAVEWESNGQPENNYKTTPPVLDSDGSFFLYSKLTVDKSRWQQGNVFSCSVMHEALHNHYTQKSLSLSPGK

SEQ ID NO: 372 - DNA, 1359 bp, Artificial Sequence
  Description of Artificial Sequence: Synthetic polynucleotide
caggtgcagctgcaggagtccggacctggactggtgaagccatctgagaccctgagcctgacctgcacagtgagcggcttctccctgaccacatacaacatccactggatcagacagccacctggcaagggactggagtggatcggccggatgagatactccggcgacacatcttatagctccgccctgaagtctagggtgaccatcagccgcgatacatccaagaaccaggtgagcctgaagctgtctagcgtgaccgccgccgacacagccgtgtactattgtacccgggaccccatgtatatccccggctactcttatggcgtgatgaatgcctggggccagggcaccacagtgacagtgtcctctgctagcaccaagggcccatcggtcttccccctggcaccctcctccaagagcacctctgggggcacagcggccctgggctgcctggtcaaggactacttccccgaaccggtgacggtgtcgtggaactcaggcgccctgaccagcggcgtgcacaccttcccggctgtcctacagtcctcaggactctactccctcagcagcgtggtgaccgtgccctccagcagcttgggcacccagacctacatctgcaacgtgaatcacaagcccagcaacaccaaggtggacaagagagttgagcccaaatcttgtgacaaaactcacacatgcccaccgtgcccagcacctgaagccgctgggggaccgtcagtcttcctcttccccccaaaacccaaggacaccctcatgatctcccggacccctgaggtcacatgcgtggtggtggacgtgagccacgaagaccctgaggtcaagttcaactggtacgtggacggcgtggaggtgcataatgccaagacaaagccgcgggaggagcagtacaacagcacgtaccgtgtggtcagcgtcctcaccgtcctgcaccaggactggctgaatggcaaggagtacaagtgcaaggtctccaacaaagccctcccagcccccatcgagaaaaccatctccaaagccaaagggcagccccgagaaccacaggtgtacaccctgcccccatcccgggaggagatgaccaagaaccaggtcagcctgacctgcctggtcaaaggcttctatcccagcgacatcgccgtggagtgggagagcaatgggcagccggagaacaactacaagaccacgcctcccgtgctggactccgacggctccttcttcctctacagcaagctcaccgtggacaagagcaggtggcagcaggggaacgtcttctcatgctccgtgatgcatgaggctctgcacaaccactacacgcagaagagcctctccctgtctccgggtaaa

SEQ ID NO: 373 - protein, 11 aa, Artificial Sequence
  Description of Artificial Sequence: Synthetic peptide
KTSQNIDKYLN

SEQ ID NO: 374 - protein, 7 aa, Artificial Sequence
  Description of Artificial Sequence: Synthetic peptide
NTNNLEA

SEQ ID NO: 375 - protein, 8 aa, Artificial Sequence
  Description of Artificial Sequence: Synthetic peptide
LQHRSSYT

SEQ ID NO: 376 - protein, 11 aa, Artificial Sequence
  Description of Artificial Sequence: Synthetic peptide
KTSQNIDKYLN

SEQ ID NO: 377 - protein, 7 aa, Artificial Sequence
  Description of Artificial Sequence: Synthetic peptide
NTNNLEA

SEQ ID NO: 378 - protein, 8 aa, Artificial Sequence
  Description of Artificial Sequence: Synthetic peptide
LQHRSSYT

SEQ ID NO: 379 - protein, 7 aa, Artificial Sequence
  Description of Artificial Sequence: Synthetic peptide
SQNIDKY

SEQ ID NO: 380 - protein, 3 aa, Artificial Sequence
  Description of Artificial Sequence: Synthetic peptide
NTN

SEQ ID NO: 381 - protein, 5 aa, Artificial Sequence
  Description of Artificial Sequence: Synthetic peptide
HRSSY

SEQ ID NO: 382 - protein, 6 aa, Artificial Sequence
  Description of Artificial Sequence: Synthetic peptide
QNIDKY

SEQ ID NO: 383 - protein, 10 aa, Artificial Sequence
  Description of Artificial Sequence: Synthetic peptide
NTNNLEAGVP

SEQ ID NO: 384 - protein, 8 aa, Artificial Sequence
  Description of Artificial Sequence: Synthetic peptide
LQHRSSYT

SEQ ID NO: 385 - protein, 106 aa, Artificial Sequence
  Description of Artificial Sequence: Synthetic polypeptide
DIQMTQSPSSLSASVGDRVTITCKTSQNIDKYLNWYQQKPGKAPKLLIYNTNNLEAGVPSRFSGSGSGTDYTFTISSLQPEDIATYFCLQHRSSYTFGQGTKLEIK

SEQ ID NO: 386 - DNA, 318 bp, Artificial Sequence
  Description of Artificial Sequence: Synthetic polynucleotide
gacatccagatgacccagtctccaagctccctgagcgcctccgtgggcgacagggtgaccatcacatgcaagacaagccagaacatcgataagtacctgaattggtatcagcagaagcccggcaaggcccctaagctgctgatctacaacaccaacaatctggaggcaggagtgccatcccggttctctggcagcggctccggaaccgactatacctttacaatctctagcctgcagcccgaggatatcgccacatacttctgtctgcagcacagatcctcttatacctttggccagggcacaaagctggagatcaag

SEQ ID NO: 387 - protein, 213 aa, Artificial Sequence
  Description of Artificial Sequence: Synthetic polypeptide
DIQMTQSPSSLSASVGDRVTITCKTSQNIDKYLNWYQQKPGKAPKLLIYNTNNLEAGVPSRFSGSGSGTDYTFTISSLQPEDIATYFCLQHRSSYTFGQGTKLEIKRTVAAPSVFIFPPSDEQLKSGTASVVCLLNNFYPREAKVQWKVDNALQSGNSQESVTEQDSKDSTYSLSSTLTLSKADYEKHKVYACEVTHQGLSSPVTKSFNRGEC

SEQ ID NO: 388 - DNA, 639 bp, Artificial Sequence
  Description of Artificial Sequence: Synthetic polynucleotide
gacatccagatgacccagtctccaagctccctgagcgcctccgtgggcgacagggtgaccatcacatgcaagacaagccagaacatcgataagtacctgaattggtatcagcagaagcccggcaaggcccctaagctgctgatctacaacaccaacaatctggaggcaggagtgccatcccggttctctggcagcggctccggaaccgactatacctttacaatctctagcctgcagcccgaggatatcgccacatacttctgtctgcagcacagatcctcttatacctttggccagggcacaaagctggagatcaagcgtacggtggctgcaccatctgtcttcatcttcccgccatctgatgagcagttgaaatctggaactgcctctgttgtgtgcctgctgaataacttctatccccgcgaggccaaagtacagtggaaggtggataacgccctccaatcgggtaactcccaggagagtgtcacagagcaggacagcaaggacagcacctacagcctcagcagcaccctgacgctgagcaaagcagactacgagaaacacaaagtctacgcctgcgaagtcacccatcagggcctgagctcgcccgtcacaaagagcttcaaccgcggagagtgt

SEQ ID NO: 389 - protein, 10 aa, Artificial Sequence
  Description of Artificial Sequence: Synthetic peptide
GFAFRKYGMS

SEQ ID NO: 390 - protein, 17 aa, Artificial Sequence
  Description of Artificial Sequence: Synthetic peptide
LIYYDSSKMNYADTVKG

SEQ ID NO: 391 - protein, 6 aa, Artificial Sequence
  Description of Artificial Sequence: Synthetic peptide
LNSEYD

SEQ ID NO: 392 - protein, 5 aa, Artificial Sequence
  Description of Artificial Sequence: Synthetic peptide
KYGMS

SEQ ID NO: 393 - protein, 17 aa, Artificial Sequence
  Description of Artificial Sequence: Synthetic peptide
LIYYDSSKMNYADTVKG

SEQ ID NO: 394 - protein, 6 aa, Artificial Sequence
  Description of Artificial Sequence: Synthetic peptide
LNSEYD

SEQ ID NO: 395 - protein, 7 aa, Artificial Sequence
  Description of Artificial Sequence: Synthetic peptide
GFAFRKY

SEQ ID NO: 396 - protein, 6 aa, Artificial Sequence
  Description of Artificial Sequence: Synthetic peptide
YYDSSK

SEQ ID NO: 397 - protein, 6 aa, Artificial Sequence
  Description of Artificial Sequence: Synthetic peptide
LNSEYD

SEQ ID NO: 398 - protein, 8 aa, Artificial Sequence
  Description of Artificial Sequence: Synthetic peptide
GFAFRKYG

SEQ ID NO: 399 - protein, 8 aa, Artificial Sequence
  Description of Artificial Sequence: Synthetic peptide
IYYDSSKM

SEQ ID NO: 400 - protein, 8 aa, Artificial Sequence
  Description of Artificial Sequence: Synthetic peptide
AALNSEYD

SEQ ID NO: 401 - protein, 115 aa, Artificial Sequence
  Description of Artificial Sequence: Synthetic polypeptide
QVQLVESGGGVVQPGRSLRLSCAASGFAFRKYGMSWVRQAPGKGLEWVALIYYDSSKMNYADTVKGRFTISRDNSKNTLYLQMNSLRAEDTAVYYCAALNSEYDWGQGTMVTVSS

SEQ ID NO: 402 - DNA, 345 bp, Artificial Sequence
  Description of Artificial Sequence: Synthetic polynucleotide
caggtgcagctggtggagtctggaggaggagtggtgcagccaggccggtccctgagactgtcttgcgccgccagcggcttcgcctttcggaagtacggaatgagctgggtgaggcaggcacctggcaagggactggagtgggtggccctgatctactatgacagctccaagatgaactacgccgataccgtgaagggcaggttcacaatctcccgcgacaactctaagaataccctgtatctgcagatgaacagcctgcgggccgaggacacagccgtgtactattgtgccgccctgaattccgagtatgattggggccagggcaccatggtgacagtgtctagc

SEQ ID NO: 403 - protein, 445 aa, Artificial Sequence
  Description of Artificial Sequence: Synthetic polypeptide
QVQLVESGGGVVQPGRSLRLSCAASGFAFRKYGMSWVRQAPGKGLEWVALIYYDSSKMNYADTVKGRFTISRDNSKNTLYLQMNSLRAEDTAVYYCAALNSEYDWGQGTMVTVSSASTKGPSVFPLAPSSKSTSGGTAALGCLVKDYFPEPVTVSWNSGALTSGVHTFPAVLQSSGLYSLSSVVTVPSSSLGTQTYICNVNHKPSNTKVDKRVEPKSCDKTHTCPPCPAPEAAGGPSVFLFPPKPKDTLMISRTPEVTCVVVDVSHEDPEVKFNWYVDGVEVHNAKTKPREEQYNSTYRVVSVLTVLHQDWLNGKEYKCKVSNKALPAPIEKTISKAKGQPREPQVYTLPPSREEMTKNQVSLTCLVKGFYPSDIAVEWESNGQPENNYKTTPPVLDSDGSFFLYSKLTVDKSRWQQGNVFSCSVMHEALHNHYTQKSLSLSPGK

SEQ ID NO: 404 - DNA, 1335 bp, Artificial Sequence
  Description of Artificial Sequence: Synthetic polynucleotide
caggtgcagctggtggagtctggaggaggagtggtgcagccaggccggtccctgagactgtcttgcgccgccagcggcttcgcctttcggaagtacggaatgagctgggtgaggcaggcacctggcaagggactggagtgggtggccctgatctactatgacagctccaagatgaactacgccgataccgtgaagggcaggttcacaatctcccgcgacaactctaagaataccctgtatctgcagatgaacagcctgcgggccgaggacacagccgtgtactattgtgccgccctgaattccgagtatgattggggccagggcaccatggtgacagtgtctagcgctagcaccaagggcccatcggtcttccccctggcaccctcctccaagagcacctctgggggcacagcggccctgggctgcctggtcaaggactacttccccgaaccggtgacggtgtcgtggaactcaggcgccctgaccagcggcgtgcacaccttcccggctgtcctacagtcctcaggactctactccctcagcagcgtggtgaccgtgccctccagcagcttgggcacccagacctacatctgcaacgtgaatcacaagcccagcaacaccaaggtggacaagagagttgagcccaaatcttgtgacaaaactcacacatgcccaccgtgcccagcacctgaagccgctgggggaccgtcagtcttcctcttccccccaaaacccaaggacaccctcatgatctcccggacccctgaggtcacatgcgtggtggtggacgtgagccacgaagaccctgaggtcaagttcaactggtacgtggacggcgtggaggtgcataatgccaagacaaagccgcgggaggagcagtacaacagcacgtaccgtgtggtcagcgtcctcaccgtcctgcaccaggactggctgaatggcaaggagtacaagtgcaaggtctccaacaaagccctcccagcccccatcgagaaaaccatctccaaagccaaagggcagccccgagaaccacaggtgtacaccctgcccccatcccgggaggagatgaccaagaaccaggtcagcctgacctgcctggtcaaaggcttctatcccagcgacatcgccgtggagtgggagagcaatgggcagccggagaacaactacaagaccacgcctcccgtgctggactccgacggctccttcttcctctacagcaagctcaccgtggacaagagcaggtggcagcaggggaacgtcttctcatgctccgtgatgcatgaggctctgcacaaccactacacgcagaagagcctctccctgtctccgggtaaa

SEQ ID NO: 405 - protein, 11 aa, Artificial Sequence
  Description of Artificial Sequence: Synthetic peptide
RGSQSIGNSLN

SEQ ID NO: 406 - protein, 7 aa, Artificial Sequence
  Description of Artificial Sequence: Synthetic peptide
STSTLEY

SEQ ID NO: 407 - protein, 9 aa, Artificial Sequence
  Description of Artificial Sequence: Synthetic peptide
LQYATYPYT

SEQ ID NO: 408 - protein, 11 aa, Artificial Sequence
  Description of Artificial Sequence: Synthetic peptide
RGSQSIGNSLN

SEQ ID NO: 409 - protein, 7 aa, Artificial Sequence
  Description of Artificial Sequence: Synthetic peptide
STSTLEY

SEQ ID NO: 410 - protein, 9 aa, Artificial Sequence
  Description of Artificial Sequence: Synthetic peptide
LQYATYPYT

SEQ ID NO: 411 - protein, 7 aa, Artificial Sequence
  Description of Artificial Sequence: Synthetic peptide
SQSIGNS

SEQ ID NO: 412 - protein, 3 aa, Artificial Sequence
  Description of Artificial Sequence: Synthetic peptide
STS

SEQ ID NO: 413 - protein, 6 aa, Artificial Sequence
  Description of Artificial Sequence: Synthetic peptide
YATYPY

SEQ ID NO: 414 - protein, 6 aa, Artificial Sequence
  Description of Artificial Sequence: Synthetic peptide
QSIGNS

SEQ ID NO: 415 - protein, 10 aa, Artificial Sequence
  Description of Artificial Sequence: Synthetic peptide
STSTLEYGVP

SEQ ID NO: 416 - protein, 9 aa, Artificial Sequence
  Description of Artificial Sequence: Synthetic peptide
LQYATYPYT

SEQ ID NO: 417 - protein, 107 aa, Artificial Sequence
  Description of Artificial Sequence: Synthetic polypeptide
DIQMTQSPSSLSASVGDRVTITCRGSQSIGNSLNWYQQKPGKAPKRLIYSTSTLEYGVPSRFSGSGSGTEYTLTISSLQPEDFATYYCLQYATYPYTFGQGTKLEIK

SEQ ID NO: 418 - DNA, 321 bp, Artificial Sequence
  Description of Artificial Sequence: Synthetic polynucleotide
gacatccagatgacccagtcccctagctccctgtccgcctctgtgggcgatagggtgaccatcacatgcagaggcagccagtccatcggcaactctctgaattggtaccagcagaagcccggcaaggcccctaagaggctgatctactctaccagcacactggagtatggagtgccatcccggttctccggctctggcagcggaaccgagtacaccctgacaatctctagcctgcagccagaggacttcgccacatactattgtctgcagtatgccacctacccctatacatttggccagggcacaaagctggagatcaag

SEQ ID NO: 419 - protein, 214 aa, Artificial Sequence
  Description of Artificial Sequence: Synthetic polypeptide
DIQMTQSPSSLSASVGDRVTITCRGSQSIGNSLNWYQQKPGKAPKRLIYSTSTLEYGVPSRFSGSGSGTEYTLTISSLQPEDFATYYCLQYATYPYTFGQGTKLEIKRTVAAPSVFIFPPSDEQLKSGTASVVCLLNNFYPREAKVQWKVDNALQSGNSQESVTEQDSKDSTYSLSSTLTLSKADYEKHKVYACEVTHQGLSSPVTKSFNRGEC

SEQ ID NO: 420 - DNA, 642 bp, Artificial Sequence
  Description of Artificial Sequence: Synthetic polynucleotide
gacatccagatgacccagtcccctagctccctgtccgcctctgtgggcgatagggtgaccatcacatgcagaggcagccagtccatcggcaactctctgaattggtaccagcagaagcccggcaaggcccctaagaggctgatctactctaccagcacactggagtatggagtgccatcccggttctccggctctggcagcggaaccgagtacaccctgacaatctctagcctgcagccagaggacttcgccacatactattgtctgcagtatgccacctacccctatacatttggccagggcacaaagctggagatcaagcgtacggtggctgcaccatctgtcttcatcttcccgccatctgatgagcagttgaaatctggaactgcctctgttgtgtgcctgctgaataacttctatccccgcgaggccaaagtacagtggaaggtggataacgccctccaatcgggtaactcccaggagagtgtcacagagcaggacagcaaggacagcacctacagcctcagcagcaccctgacgctgagcaaagcagactacgagaaacacaaagtctacgcctgcgaagtcacccatcagggcctgagctcgcccgtcacaaagagcttcaaccgcggagagtgt

SEQ ID NO: 421 - protein, 10 aa, Artificial Sequence
  Description of Artificial Sequence: Synthetic peptide
GFSLTTYNIH

SEQ ID NO: 422 - protein, 16 aa, Artificial Sequence
  Description of Artificial Sequence: Synthetic peptide
RMRYSGDTSYSSALKS

SEQ ID NO: 423 - protein, 15 aa, Artificial Sequence
  Description of Artificial Sequence: Synthetic peptide
DPMYIPGYSYGVMNA

SEQ ID NO: 424 - protein, 5 aa, Artificial Sequence
  Description of Artificial Sequence: Synthetic peptide
TYNIH

SEQ ID NO: 425 - protein, 16 aa, Artificial Sequence
  Description of Artificial Sequence: Synthetic peptide
RMRYSGDTSYSSALKS

SEQ ID NO: 426 - protein, 15 aa, Artificial Sequence
  Description of Artificial Sequence: Synthetic peptide
DPMYIPGYSYGVMNA

SEQ ID NO: 427 - protein, 7 aa, Artificial Sequence
  Description of Artificial Sequence: Synthetic peptide
GFSLTTY

SEQ ID NO: 428 - protein, 5 aa, Artificial Sequence
  Description of Artificial Sequence: Synthetic peptide
RYSGD

SEQ ID NO: 429 - protein, 15 aa, Artificial Sequence
  Description of Artificial Sequence: Synthetic peptide
DPMYIPGYSYGVMNA

SEQ ID NO: 430 - protein, 8 aa, Artificial Sequence
  Description of Artificial Sequence: Synthetic peptide
GFSLTTYN

SEQ ID NO: 431 - protein, 7 aa, Artificial Sequence
  Description of Artificial Sequence: Synthetic peptide
MRYSGDT

SEQ ID NO: 432 - protein, 17 aa, Artificial Sequence
  Description of Artificial Sequence: Synthetic peptide
TRDPMYIPGYSYGVMNA

SEQ ID NO: 433 - protein, 123 aa, Artificial Sequence; identical to SEQ ID NO: 369
  Description of Artificial Sequence: Synthetic polypeptide

SEQ ID NO: 434 - DNA, 369 bp, Artificial Sequence; identical to SEQ ID NO: 370
  Description of Artificial Sequence: Synthetic polynucleotide

SEQ ID NO: 435 - protein, 453 aa, Artificial Sequence; identical to SEQ ID NO: 371
  Description of Artificial Sequence: Synthetic polypeptide

SEQ ID NO: 436 - DNA, 1359 bp, Artificial Sequence; identical to SEQ ID NO: 372
  Description of Artificial Sequence: Synthetic polynucleotide

SEQ ID NO: 437 - protein, 11 aa, Artificial Sequence
  Description of Artificial Sequence: Synthetic peptide
KSSQNIDKYLN

SEQ ID NO: 438 - protein, 7 aa, Artificial Sequence
  Description of Artificial Sequence: Synthetic peptide
NTNNLEA

SEQ ID NO: 439 - protein, 8 aa, Artificial Sequence
  Description of Artificial Sequence: Synthetic peptide
LQHRSGYT

SEQ ID NO: 440 - protein, 11 aa, Artificial Sequence
  Description of Artificial Sequence: Synthetic peptide
KSSQNIDKYLN

SEQ ID NO: 441 - protein, 7 aa, Artificial Sequence
  Description of Artificial Sequence: Synthetic peptide
NTNNLEA

SEQ ID NO: 442 - protein, 8 aa, Artificial Sequence
  Description of Artificial Sequence: Synthetic peptide
LQHRSGYT

SEQ ID NO: 443 - protein, 7 aa, Artificial Sequence
  Description of Artificial Sequence: Synthetic peptide
SQNIDKY

SEQ ID NO: 444 - protein, 3 aa, Artificial Sequence
  Description of Artificial Sequence: Synthetic peptide
NTN

SEQ ID NO: 445 - protein, 5 aa, Artificial Sequence
  Description of Artificial Sequence: Synthetic peptide
HRSGY

SEQ ID NO: 446 - protein, 6 aa, Artificial Sequence
  Description of Artificial Sequence: Synthetic peptide
QNIDKY

SEQ ID NO: 447 - protein, 10 aa, Artificial Sequence
  Description of Artificial Sequence: Synthetic peptide
NTNNLEAGVP

SEQ ID NO: 448 - protein, 8 aa, Artificial Sequence
  Description of Artificial Sequence: Synthetic peptide
LQHRSGYT

SEQ ID NO: 449 - protein, 106 aa, Artificial Sequence
  Description of Artificial Sequence: Synthetic polypeptide
DIQMTQSPSSLSASVGDRVTITCKSSQNIDKYLNWYQQKPGKAPKLLIYNTNNLEAGVPSRFSGSGSGTDYTFTISSLQPEDIATYFCLQHRSGYTFGQGTKLEIK

SEQ ID NO: 450 - DNA, 336 bp, Artificial Sequence
  Description of Artificial Sequence: Synthetic polynucleotide
ggatccaccggcgacatccagatgacccagtccccaagctccctgagcgcctccgtgggcgaccgggtgaccatcacatgcaagtctagccagaacatcgataagtacctgaattggtatcagcagaagcccggcaaggcccctaagctgctgatctacaacacaaacaatctggaggccggcgtgccatctcggttctctggcagcggctccggaaccgactatacctttacaatctcctctctgcagcccgaggatatcgccacatacttctgtctgcagcacagaagcggctatacctttggccagggcacaaagctggagatcaagcgtacg

SEQ ID NO: 451 - protein, 213 aa, Artificial Sequence
  Description of Artificial Sequence: Synthetic polypeptide
DIQMTQSPSSLSASVGDRVTITCKSSQNIDKYLNWYQQKPGKAPKLLIYNTNNLEAGVPSRFSGSGSGTDYTFTISSLQPEDIATYFCLQHRSGYTFGQGTKLEIKRTVAAPSVFIFPPSDEQLKSGTASVVCLLNNFYPREAKVQWKVDNALQSGNSQESVTEQDSKDSTYSLSSTLTLSKADYEKHKVYACEVTHQGLSSPVTKSFNRGEC

SEQ ID NO: 452 - DNA, 657 bp, Artificial Sequence
  Description of Artificial Sequence: Synthetic polynucleotide
ggatccaccggcgacatccagatgacccagtccccaagctccctgagcgcctccgtgggcgaccgggtgaccatcacatgcaagtctagccagaacatcgataagtacctgaattggtatcagcagaagcccggcaaggcccctaagctgctgatctacaacacaaacaatctggaggccggcgtgccatctcggttctctggcagcggctccggaaccgactatacctttacaatctcctctctgcagcccgaggatatcgccacatacttctgtctgcagcacagaagcggctatacctttggccagggcacaaagctggagatcaagcgtacgcgtacggtggctgcaccatctgtcttcatcttcccgccatctgatgagcagttgaaatctggaactgcctctgttgtgtgcctgctgaataacttctatccccgcgaggccaaagtacagtggaaggtggataacgccctccaatcgggtaactcccaggagagtgtcacagagcaggacagcaaggacagcacctacagcctcagcagcaccctgacgctgagcaaagcagactacgagaaacacaaagtctacgcctgcgaagtcacccatcagggcctgagctcgcccgtcacaaagagcttcaaccgcggagagtgt

SEQ ID NO: 453 - protein, 214 aa, Artificial Sequence
  Description of Artificial Sequence: Synthetic polypeptide
EIVMTQSPATLSLSPGERATLSCRASQDISKYLNWYQQKPGQAPRLLIYHTSRLHSGIPARFSGSGSGTDYTLTISSLQPEDFAVYFCQQGNTLPYTFGQGTKLEIKRTVAAPSVFIFPPSDEQLKSGTASVVCLLNNFYPREAKVQWKVDNALQSGNSQESVTEQDSKDSTYSLSSTLTLSKADYEKHKVYACEVTHQGLSSPVTKSFNRGEC

SEQ ID NO: 454 - protein, 450 aa, Artificial Sequence
  Description of Artificial Sequence: Synthetic polypeptide
QVQLQESGPGLVKPSETLSLTCTVSGVSLPDYGVSWIRQPPGKGLEWIGVIWGSETTYYQSSLKSRVTISKDNSKNQVSLKLSSVTAADTAVYYCAKHYYYGGSYAMDYWGQGTLVTVSSASTKGPSVFPLAPSSKSTSGGTAALGCLVKDYFPEPVTVSWNSGALTSGVHTFPAVLQSSGLYSLSSVVTVPSSSLGTQTYICNVNHKPSNTKVDKRVEPKSCDKTHTCPPCPAPELLGGPSVFLFPPKPKDTLMISRTPEVTCVVVDVSHEDPEVKFNWYVDGVEVHNAKTKPREEQYASTYRVVSVLTVLHQDWLNGKEYKCKVSNKALPAPIEKTISKAKGQPREPQVCTLPPSREEMTKNQVSLSCAVKGFYPSDIAVEWESNGQPENNYKTTPPVLDSDGSFFLVSKLTVDKSRWQQGNVFSCSVMHEALHNHYTQKSLSLSPGK

SEQ ID NO: 455 - protein, 486 aa, Artificial Sequence
  Description of Artificial Sequence: Synthetic polypeptide
EVQLVESGGGLVQPGGSLKLSCAASGFTFNTYAMNWVRQASGKGLEWVGRIRSKYNNYATYYADSVKDRFTISRDDSKSTLYLQMNSLKTEDTAVYYCVRHGNFGNSYVSWFAYWGQGTLVTVSSGGGGSGGGGSGGGGSGGGGSQAVVTQEPSLTVSPGGTVTLTCRSSTGAVTTSNYANWVQQKPGQAPRGLIGGTNKRAPWTPARFSGSLLGDKAALTLSGAQPEDEAEYFCALWYSNLWVFGGGTKLTVLGGGGSDKTHTCPPCPAPELLGGPSVFLFPPKPKDTLMISRTPEVTCVVVDVSHEDPEVKFNWYVDGVEVHNAKTKPREEQYASTYRVVSVLTVLHQDWLNGKEYKCKVSNKALPAPIEKTISKAKGQPREPQVYTLPPCREEMTKNQVSLWCLVKGFYPSDIAVEWESNGQPENNYKTTPPVLDSDGSFFLYSKLTVDKSRWQQGNVFSCSVMHEALHNHYTQKSLSLSPGK

SEQ ID NO: 456 - protein, 488 aa, Artificial Sequence
  Description of Artificial Sequence: Synthetic polypeptide
QVQLHQSGAELAKPGTSVNLSCKASGYTFTSYYIYWIKRRPGQGLEWIGYIYPGHDAIYYSENFKGKATFTADTSSSTAYMLLGSLTPEDSAYYFCVRPNTMMAPLAYWGQGTLVTVSSGGGGSGGGGSGGGGSGGGGSVVVLTQTPVSLPVSLGGQASISCRSSQSLIYSIGNTYLHWYLQKPGQSPQLLIYRVSNRFSGVPDRFSGSGSGTDFTLKISRVEPEDLGDYYCFQSTHLPYTFGAGTKLELKGGGGSGGGGSDKTHTCPPCPAPELLGGPSVFLFPPKPKDTLMISRTPEVTCVVVDVSHEDPEVKFNWYVDGVEVHNAKTKPREEQYNSTYRVVSVLTVLHQDWLNGKEYKCKVSNKALPAPIEKTISKAKGQPREPQVYTLPPCREEMTKNQVSLWCLVKGFYPSDIAVEWESNGQPENNYKTTPPVLDSDGSFFLYSKLTVDKSRWQQGNVFSCSVMHEALHNRYTQKSLSLSPGK

SEQ ID NO: 457 - protein, 480 aa, Artificial Sequence
  Description of Artificial Sequence: Synthetic polypeptide
QVQLVQSGAEVKKPGASVKVSCKASGYTFTSYYIYWVRQAPGQRLEWMGYIYPANGGIYYSEKFKGRVTITADTSAGTAYMELSSLRSEDTAVYYCARPVTMMAPLVFWGQGTLVTVSSGGGGSGGGGSGGGGSGGGGSDVVMTQSPLSLPVTLGQPASISCRSSQSLVYSHGNTYLHWYQQRPGQSPRLLIYRVSNRFSGVPDRFSGSGSGTDFTLKISRVEAEDVGVYYCFQSTHLPYTFGQGTKLEIKGSDKTHTCPPCPAPELLGGPSVFLFPPKPKDTLMISRTPEVTCVVVDVSHEDPEVKFNWYVDGVEVHNAKTKPREEQYASTYRVVSVLTVLHQDWLNGKEYKCKVSNKALPAPIEKTISKAKGQPREPQVYTLPPCREEMTKNQVSLWCLVKGFYPSDIAVEWESNGQPENNYKTTPPVLDSDGSFFLYSKLTVDKSRWQQGNVFSCSVMHEALHNRYTQKSLSLSPGK

SEQ ID NO: 458 - protein, 470 aa, Artificial Sequence
  Description of Artificial Sequence: Synthetic polypeptide
QVQLVESGGGVVQPGRSLRLSCAASGFAFRKYGMSWVRQAPGKGLEWVALIYYDSSKMNYADTVKGRFTISRDNSKNTLYLQMNSLRAEDTAVYYCAALNSEYDWGQGTMVTVSGGGGSGGGGSGGGGSGGGGSDIQMTQSPSSLSASVGDRVTITCRGSQSIGNSLNWYQQKPGKAPKRLIYSTSTLEYGVPSRFSGSGSGTEYTLTISSLQPEDFATYYCLQYATYPYTFGQGTKLEIKGSDKTHTCPPCPAPELLGGPSVFLFPPKPKDTLMISRTPEVTCVVVDVSHEDPEVKFNWYVDGVEVHNAKTKPREEQYASTYRVVSVLTVLHQDWLNGKEYKCKVSNKALPAPIEKTISKAKGQPREPQVYTLPPCREEMTKNQVSLWCLVKGFYPSDIAVEWESNGQPENNYKTTPPVLDSDGSFFLYSKLTVDKSRWQQGNVFSCSVMHEALHNRYTQKSLSLSPGK

SEQ ID NO: 459 - skipped

SEQ ID NO: 460 - protein, 480 aa, Artificial Sequence
  Description of Artificial Sequence: Synthetic polypeptide
QVQLVQSGAEVKKPGASVKVSCKASGYTFTSYYIYWVRQAPGQRLEWMGYIYPGHDAIYYSENFKGRVTITADTSASTAYMELSSLRSEDTAVYYCVRPNTMMAPLAYWGQGTLVTVSSGGGGSGGGGSGGGGSGGGGSDVVMTQSPLSLPVTLGQPASISCRSSQSLIYSIGNTYLHWYQQRPGQSPRLLIYRVSNRFSGVPDRFSGSGSGTDFTLKISRVEAEDVGVYYCFQSTHLPYTFGQGTKLEIKGSDKTHTCPPCPAPELLGGPSVFLFPPKPKDTLMISRTPEVTCVVVDVSHEDPEVKFNWYVDGVEVHNAKTKPREEQYASTYRVVSVLTVLHQDWLNGKEYKCKVSNKALPAPIEKTISKAKGQPREPQVYTLPPCREEMTKNQVSLWCLVKGFYPSDIAVEWESNGQPENNYKTTPPVLDSDGSFFLYSKLTVDKSRWQQGNVFSCSVMHEALHNRYTQKSLSLSPGK

SEQ ID NO: 461 - protein, 450 aa, Artificial Sequence; identical to SEQ ID NO: 454
  Description of Artificial Sequence: Synthetic polypeptide

SEQ ID NO: 462 - protein, 11 aa, Artificial Sequence
  Description of Artificial Sequence: Synthetic peptide
AKFWWDLDFDH

SEQ ID NO: 463 - protein, 17 aa, Artificial Sequence
  Description of Artificial Sequence: Synthetic peptide
ASDPMYIPNYAYGVMNA

SEQ ID NO: 464 - protein, 11 aa, Artificial Sequence
  Description of Artificial Sequence: Synthetic peptide
ASFSSDLDFDH

SEQ ID NO: 465 - protein, 11 aa, Artificial Sequence
  Description of Artificial Sequence: Synthetic peptide
ASFSWDLDFDH

SEQ ID NO: 466 - protein, 11 aa, Artificial Sequence
  Description of Artificial Sequence: Synthetic peptide
ASFTTDLDFDH

SEQ ID NO: 467 - protein, 11 aa, Artificial Sequence
  Description of Artificial Sequence: Synthetic peptide
ASFTWDLDFDH

SEQ ID NO: 468 - protein, 11 aa, Artificial Sequence
  Description of Artificial Sequence: Synthetic peptide
ASFWSDLDFDH

SEQ ID NO: 469 - protein, 11 aa, Artificial Sequence
  Description of Artificial Sequence: Synthetic peptide
ASFWTDLDFDH

SEQ ID NO: 470 - protein, 11 aa, Artificial Sequence
  Description of Artificial Sequence: Synthetic peptide
ASFYYDLDFDH

SEQ ID NO: 471 - protein, 15 aa, Artificial Sequence
  Description of Artificial Sequence: Synthetic peptide
DPMYIPNYAYGVMNA

SEQ ID NO: 472 - protein, 9 aa, Artificial Sequence
  Description of Artificial Sequence: Synthetic peptide
FSSDLDFDH

SEQ ID NO: 473 - protein, 9 aa, Artificial Sequence
  Description of Artificial Sequence: Synthetic peptide
FSWDLDFDH

SEQ ID NO: 474 - protein, 9 aa, Artificial Sequence
  Description of Artificial Sequence: Synthetic peptide
FTTDLDFDH

SEQ ID NO: 475 - protein, 9 aa, Artificial Sequence
  Description of Artificial Sequence: Synthetic peptide
FTWDLDFDH

SEQ ID NO: 476 - protein, 9 aa, Artificial Sequence
  Description of Artificial Sequence: Synthetic peptide
FWSDLDFDH

SEQ ID NO: 477 - protein, 9 aa, Artificial Sequence
  Description of Artificial Sequence: Synthetic peptide
FWTDLDFDH

SEQ ID NO: 478 - protein, 9 aa, Artificial Sequence
  Description of Artificial Sequence: Synthetic peptide
FYYDLDFDH

SEQ ID NO: 479 - protein, 7 aa, Artificial Sequence
  Description of Artificial Sequence: Synthetic peptide
GFTFSKQ

SEQ ID NO: 480 - protein, 8 aa, Artificial Sequence
  Description of Artificial Sequence: Synthetic peptide
GFTFSKQG

SEQ ID NO: 481 - protein, 10 aa, Artificial Sequence
  Description of Artificial Sequence: Synthetic peptide
GFTFSKQGMH

SEQ ID NO: 482 - protein, 5 aa, Artificial Sequence
  Description of Artificial Sequence: Synthetic peptide
KNQMH

SEQ ID NO: 483 - protein, 5 aa, Artificial Sequence
  Description of Artificial Sequence: Synthetic peptide
KQGMH

SEQ ID NO: 484 - protein, 5 aa, Artificial Sequence
  Description of Artificial Sequence: Synthetic peptide
LQSSH

SEQ ID NO: 485 - protein, 8 aa, Artificial Sequence
  Description of Artificial Sequence: Synthetic peptide
LQSSHFPW

SEQ ID NO: 486 - protein, 11 aa, Artificial Sequence
  Description of Artificial Sequence: Synthetic peptide
QSLVRSEGTTY

SEQ ID NO: 487 - protein, 16 aa, Artificial Sequence
  Description of Artificial Sequence: Synthetic peptide
RSSQSLVRSEGTTYFN

SEQ ID NO: 488 - protein, 12 aa, Artificial Sequence
  Description of Artificial Sequence: Synthetic peptide
SQSLVRSEGTTY

SEQ ID NO: 489 - protein, 112 aa, Artificial Sequence
  Description of Artificial Sequence: Synthetic polypeptide
DILVTQTPVSLPVSLGGHVSISCRSSQSLVRSEGTTYFNWYLQKPGQSPQLLIYRVSNRFSGVPDRFSGSGSGTDFTLKISRVEPEDLGVYYCLQSSHFPWTFGGGTKLELK

SEQ ID NO: 490 - protein, 112 aa, Artificial Sequence
  Description of Artificial Sequence: Synthetic polypeptide
DIQMTQSPSSLSASVGDRVTITCRSSQSLVRSEGTTYFNWYQQKPGKAPKLLIYRVSNRFSGVPSRFSGSGSGTDFTLTISSLQPEDFATYYCLQSSHFPWTFGGGTKVEIK

SEQ ID NO: 491 - protein, 112 aa, Artificial Sequence
  Description of Artificial Sequence: Synthetic polypeptide
DIVMTQTPLSSPVTLGQPASISCRSSQSLVRSDGTTYFNWLQQRPGQPPRLLIYRVSNRFSGVPDRFSGSGAGTDFTLKISRVEAEDVGVYYCLQSSHFPWTFGGGTKVEIK

SEQ ID NO: 492 - protein, 98 aa, Artificial Sequence
  Description of Artificial Sequence: Synthetic polypeptide
DIVMTQTPLSSPVTLGQPASISCRSSQSLVRSDGTTYFNWYQQRPGQPPRLLIYRVSNRFSGVPDRFSGSGAGTDFTLKISRVEAEDVGVYYCLQSSH

SEQ ID NO: 493 - protein, 112 aa, Artificial Sequence
  Description of Artificial Sequence: Synthetic polypeptide
DIVMTQTPLSSPVTLGQPASISCRSSQSLVRSEGTTYFNWYQQRPGQPPRLLIYRVSNRFSGVPDRFSGSGAGTDFTLKISRVEAEDVGVYYCLQSSHFPWTFGGGTKVEIK

SEQ ID NO: 494 - protein, 112 aa, Artificial Sequence
  Description of Artificial Sequence: Synthetic polypeptide
EIVLTQSPGTLSLSPGERATLSCRSSQSLVRSEGTTYFNWYQQKPGQAPRLLIYRVSNRFSGIPDRFSGSGSGTDFTLTISRLEPEDLAVYYCLQSSHFPWTFGGGTKVEIK

SEQ ID NO: 495 - protein, 106 aa, Artificial Sequence
  Description of Artificial Sequence: Synthetic polypeptide
EIVMTQSPSTLSASVGDRVIITCKASQNINNYLNWYQQKPGKAPKLLIYNTDHLQAGVPSRFSGSGSGAEFTLTISSLQPDDFATYYCLQHRSRYTFGQGTKLTVL

SEQ ID NO: 496 - protein, 118 aa, Artificial Sequence
  Description of Artificial Sequence: Synthetic polypeptide
EVKLVESGGDLVQPGDSLTLSCVASGFTFSKQGMHWIRQAPKKGLEWIAMIYYDSSKMYYADTVKGRFTISRDNSKNTLYLEMNSLRSEDTAMYYCASFWWDLDFDHWGQGVMVTVSS

SEQ ID NO: 497 - protein, 123 aa, Artificial Sequence
  Description of Artificial Sequence: Synthetic polypeptide
EVQLVESGGGLVQPGGSLRLSCAASGFSLTTYNVHWVRQAPGKGLEWVGRMRYSGDTSFNAALTSRFTISRDNSKNTLYLQMNSLRAEDTAVYYCASDPMYIPNYAYGVMNAWGQGTLVTVSS

SEQ ID NO: 498 - protein, 123 aa, Artificial Sequence
  Description of Artificial Sequence: Synthetic polypeptide
EVQLVESGGGSVQPGGSLRLSCTASGFSLTTYNVHWVRQAPGKGLEWVGRMRYSGDTSFNAALTSRFTISRDTSKNTVYLQMNSLRAEDTATYYCASDPMYIPNYAYGVMNAWGQGTTVTVSS

SEQ ID NO: 499 - protein, 123 aa, Artificial Sequence
  Description of Artificial Sequence: Synthetic polypeptide
EVQLVETGGGLVQPGGSRRLSCAASGFSLTTYNVHWVRQAPGKGLEWVGRMRYSGDTSFNAALTSRFTISRDTSKNTVYLQMNSLRAEDTGVYYCASDPMYIPNYAYGVMNAWGQGTLVTVSS

SEQ ID NO: 500 - protein, 123 aa, Artificial Sequence
  Description of Artificial Sequence: Synthetic polypeptide
EVQLVETGGGLVQPGGSRRLSCAASGFSLTTYNVHWVRQAPGKGLEWVSRMRYSGDTSFNAALTSRFTISRDTSKNTVYLQMNSLRAEDTGVYYCASDPMYIPNYAYGVMNAWGQGTLVTVSS

SEQ ID NO: 501 - protein, 118 aa, Artificial Sequence
  Description of Artificial Sequence: Synthetic polypeptide
EVQLVQSGAEVKKPGESLKISCKGSGFTFSKQGMHWVRQMPGKGLEWMGMIYYDSSKMYYADTVKGQVTISRDNSINTLYLQWSSLKASDTAMYYCASFWWDLDFDHWGQGTMVTVSS

SEQ ID NO: 502 - protein, 119 aa, Artificial Sequence
  Description of Artificial Sequence: Synthetic polypeptide
QVQLHQSGAELAKPGTSVNLSCKASGYTFTSYYIYWIKRRPGQGLEWIGYIYPGHDAIYYSENFKGKATFTADTSSSTAYMLLGSLTPEDSAYYFCVRPNTMMAPLAYWGQGTLVTVSS

SEQ ID NO: 503 - protein, 118 aa, Artificial Sequence
  Description of Artificial Sequence: Synthetic polypeptide
QVQLVESGGGVVQPGRSLRLSCAASGFTFSKNGMHWVRQAPGKGLEWVAMIYYDSSKMYYADTVKGRFTISRDNSKNTLYLQMNSLRAEDTAVYYCAKFWWDLDFDHWGQGTMVTVSS

SEQ ID NO: 504 - protein, 118 aa, Artificial Sequence
  Description of Artificial Sequence: Synthetic polypeptide
QVQLVESGGGVVQPGRSLRLSCAASGFTFSKNGMHWVRQAPGKGLEWVAMIYYDSSKMYYADTVKGRFTISRDNSKNTLYLQMNSLRAEDTAVYYCASFSSDLDFDHWGQGTMVTVSS

SEQ ID NO: 505 - protein, 118 aa, Artificial Sequence
  Description of Artificial Sequence: Synthetic polypeptide
QVQLVESGGGVVQPGRSLRLSCAASGFTFSKNGMHWVRQAPGKGLEWVAMIYYDSSKMYYADTVKGRFTISRDNSKNTLYLQMNSLRAEDTAVYYCASFSWDLDFDHWGQGTMVTVSS

SEQ ID NO: 506 - protein, 118 aa, Artificial Sequence
  Description of Artificial Sequence: Synthetic polypeptide
QVQLVESGGGVVQPGRSLRLSCAASGFTFSKNGMHWVRQAPGKGLEWVAMIYYDSSKMYYADTVKGRFTISRDNSKNTLYLQMNSLRAEDTAVYYCASFTTDLDFDHWGQGTMVTVSS

SEQ ID NO: 507 - protein, 118 aa, Artificial Sequence
  Description of Artificial Sequence: Synthetic polypeptide
QVQLVESGGGVVQPGRSLRLSCAASGFTFSKNGMHWVRQAPGKGLEWVAMIYYDSSKMYYADTVKGRFTISRDNSKNTLYLQMNSLRAEDTAVYYCASFTWDLDFDHWGQGTMVTVSS

SEQ ID NO: 508 - protein, 118 aa, Artificial Sequence
  Description of Artificial Sequence: Synthetic polypeptide
QVQLVESGGGVVQPGRSLRLSCAASGFTFSKNGMHWVRQAPGKGLEWVAMIYYDSSKMYYADTVKGRFTISRDNSKNTLYLQMNSLRAEDTAVYYCASFWSDLDFDHWGQGTMVTVSS

SEQ ID NO: 509 - protein, 118 aa, Artificial Sequence
  Description of Artificial Sequence: Synthetic polypeptide
QVQLVESGGGVVQPGRSLRLSCAASGFTFSKNGMHWVRQAPGKGLEWVAMIYYDSSKMYYADTVKGRFTISRDNSKNTLYLQMNSLRAEDTAVYYCASFWTDLDFDHWGQGTMVTVSS

SEQ ID NO: 510 - protein, 118 aa, Artificial Sequence
  Description of Artificial Sequence: Synthetic polypeptide
QVQLVESGGGVVQPGRSLRLSCAASGFTFSKNGMHWVRQAPGKGLEWVAMIYYDSSKMYYADTVKGRFTISRDNSKNTLYLQMNSLRAEDTAVYYCASFYYDLDFDHWGQGTMVTVSS

SEQ ID NO: 511 - protein, 118 aa, Artificial Sequence
  Description of Artificial Sequence: Synthetic polypeptide
QVQLVESGGGVVQPGRSLRLSCAASGFTFSKQGMHWVRQAPGKGLEWVAMIYYDSSKMYYADTVKGRFTISRDNSKNTLYLQMNSLRAEDTAVYYCASFWWDLDFDHWGQGTMVTVSS

SEQ ID NO: 512 - protein, 118 aa, Artificial Sequence
  Description of Artificial Sequence: Synthetic polypeptide
QVQLVQSGAEVKKPGASVKVSCKASGFTFSKQGMHWVRQAPGQGLEWMGMIYYDSSKMYYADTVKGRVTMTRDTSTNTLYMELSSLRSEDTAVYYCASFWWDLDFDHWGQGTMVTVSS

SEQ ID NO: 513 - protein, 122 aa, Artificial Sequence
  Description of Artificial Sequence: Synthetic polypeptide
VQLVESGGGLVQPGGSLRLSCAASGFSLTTYNVHWVRQAPGKGLEWVSRMRYSGDTSFNAALTSRFTISRDNSKNTLYLQMNSLRAEDTAVYYCASDPMYIPNYAYGVMNAWGQGTLVTVSS

SEQ ID NO: 514 - protein, 112 aa, Artificial Sequence
  Description of Artificial Sequence: Synthetic polypeptide
VVVLTQTPVSLPVSLGGQASISCRSSQSLIYSIGNTYLHWYLQKPGQSPQLLIYRVSNRFSGVPDRFSGSGSGTDFTLKISRVEPEDLGDYYCFQSTHLPYTFGAGTKLELK

SEQ ID NO: 515 - protein, 479 aa, Artificial Sequence
  Description of Artificial Sequence: Synthetic polypeptide
QVQLVESGGGVVQPGRSLRLSCAASGFTFSKNGMHWVRQAPGKGLEWVAMIYYDSSKMYYADTVKGRFTISRDNSKNTLYLQMNSLRAEDTAVYYCASFWWDLDFDHWGQGTMVTVSSGGGGSGGGGSGGGGSGGGGSDIVMTQTPLSSPVTLGQPASISCRSSQSLVRSDGTTYFNWLQQRPGQPPRLLIYRVSNRFSGVPDRFSGSGAGTDFTLKISRVEAEDVGVYYCLQSSHFPWTFGGGTKVEIKGSDKTHTCPPCPAPELLGGPSVFLFPPKPKDTLMISRTPEVTCVVVDVSHEDPEVKFNWYVDGVEVHNAKTKPREEQYASTYRVVSVLTVLHQDWLNGKEYKCKVSNKALPAPIEKTISKAKGQPREPQVYTLPPCREEMTKNQVSLWCLVKGFYPSDIAVEWESNGQPENNYKTTPPVLDSDGSFFLYSKLTVDKSRWQQGNVFSCSVMHEALHNRYTQKSLSLSPGK

SEQ ID NO: 516 - protein, 450 aa, Artificial Sequence; identical to SEQ ID NO: 454
  Description of Artificial Sequence: Synthetic polypeptide

SEQ ID NO: 517 - protein, 214 aa, Artificial Sequence; identical to SEQ ID NO: 453
  Description of Artificial Sequence: Synthetic polypeptide

SEQ ID NO: 518 - protein, 481 aa, Artificial Sequence
  Description of Artificial Sequence: Synthetic polypeptide
QVQLVESGGGVVQPGRSLRLSCAASGFTFSKNGMHWVRQAPGKGLEWVAMIYYDSSKMYYADTVKGRFTISRDNSKNTLYLQMNSLRAEDTAVYYCAKFWWDLDFDHWGQGTMVTVSSGGGGSGGGGSGGGGSGGGGSDIVMTQTPLSSPVTLGQPASISCRSSQSLVRSDGTTYFNWYQQRPGQPPRLLIYRVSNRFSGVPDRFSGSGAGTDFTLKISRVEAEDVGVYYCLQSSHFPWTFGGGTKVEIKGGGSDKTHTCPPCPAPELLGGPSVFLFPPKPKDTLMISRTPEVTCVVVDVSHEDPEVKFNWYVDGVEVHNAKTKPREEQYASTYRVVSVLTVLHQDWLNGKEYKCKVSNKALPAPIEKTISKAKGQPREPQVYTLPPCREEMTKNQVSLWCLVKGFYPSDIAVEWESNGQPENNYKTTPPVLDSDGSFFLYSKLTVDKSRWQQGNVFSCSVMHEALHNRYTQKSLSLSPGK

SEQ ID NO: 519 - protein, 479 aa, Artificial Sequence
  Description of Artificial Sequence: Synthetic polypeptide
QVQLVESGGGVVQPGRSLRLSCAASGFTFSKNGMHWVRQAPGKGLEWVAMIYYDSSKMYYADTVKGRFTISRDNSKNTLYLQMNSLRAEDTAVYYCAKFWWDLDFDHWGQGTMVTVSSGGGGSGGGGSGGGGSGGGGSDIVMTQTPLSSPVTLGQPASISCRSSQSLVRSDGTTYFNWLQQRPGQPPRLLIYRVSNRFSGVPDRFSGSGAGTDFTLKISRVEAEDVGVYYCLQSSHFPWTFGGGTKVEIKGSDKTHTCPPCPAPELLGGPSVFLFPPKPKDTLMISRTPEVTCVVVDVSHEDPEVKFNWYVDGVEVHNAKTKPREEQYASTYRVVSVLTVLHQDWLNGKEYKCKVSNKALPAPIEKTISKAKGQPREPQVYTLPPCREEMTKNQVSLWCLVKGFYPSDIAVEWESNGQPENNYKTTPPVLDSDGSFFLYSKLTVDKSRWQQGNVFSCSVMHEALHNRYTQKSLSLSPGK

SEQ ID NO: 520 - protein, 465 aa, Artificial Sequence
  Description of Artificial Sequence: Synthetic polypeptide
QVQLVESGGGVVQPGRSLRLSCAASGFTFSKNGMHWVRQAPGKGLEWVAMIYYDSSKMYYADTVKGRFTISRDNSKNTLYLQMNSLRAEDTAVYYCASFWWDLDFDHWGQGTMVTVSSGGGGSGGGGSGGGGSGGGGSDIVMTQTPLSSPVTLGQPASISCRSSQSLVRSDGTTYFNWYQQRPGQPPRLLIYRVSNRFSGVPDRFSGSGAGTDFTLKISRVEAEDVGVYYCLQSSHGSDKTHTCPPCPAPELLGGPSVFLFPPKPKDTLMISRTPEVTCVVVDVSHEDPEVKFNWYVDGVEVHNAKTKPREEQYASTYRVVSVLTVLHQDWLNGKEYKCKVSNKALPAPIEKTISKAKGQPREPQVYTLPPCREEMTKNQVSLWCLVKGFYPSDIAVEWESNGQPENNYKTTPPVLDSDGSFFLYSKLTVDKSRWQQGNVFSCSVMHEALHNRYTQKSLSLSPGK

SEQ ID NO: 521 - protein, 479 aa, Artificial Sequence
  Description of Artificial Sequence: Synthetic polypeptide
QVQLVESGGGVVQPGRSLRLSCAASGFTFSKQGMHWVRQAPGKGLEWVAMIYYDSSKMYYADTVKGRFTISRDNSKNTLYLQMNSLRAEDTAVYYCASFWWDLDFDHWGQGTMVTVSSGGGGSGGGGSGGGGSGGGGSDIVMTQTPLSSPVTLGQPASISCRSSQSLVRSEGTTYFNWYQQRPGQPPRLLIYRVSNRFSGVPDRFSGSGAGTDFTLKISRVEAEDVGVYYCLQSSHFPWTFGGGTKVEIKGSDKTHTCPPCPAPELLGGPSVFLFPPKPKDTLMISRTPEVTCVVVDVSHEDPEVKFNWYVDGVEVHNAKTKPREEQYASTYRVVSVLTVLHQDWLNGKEYKCKVSNKALPAPIEKTISKAKGQPREPQVYTLPPCREEMTKNQVSLWCLVKGFYPSDIAVEWESNGQPENNYKTTPPVLDSDGSFFLYSKLTVDKSRWQQGNVFSCSVMHEALHNRYTQKSLSLSPGK

SEQ ID NO: 522 - protein, 482 aa, Artificial Sequence
  Description of Artificial Sequence: Synthetic polypeptide
EVKLVESGGDLVQPGDSLTLSCVASGFTFSKQGMHWIRQAPKKGLEWIAMIYYDSSKMYYADTVKGRFTISRDNSKNTLYLEMNSLRSEDTAMYYCASFWWDLDFDHWGQGVMVTVSSGGGGSGGGGSGGGGSGGGGSDILVTQTPVSLPVSLGGHVSISCRSSQSLVRSEGTTYFNWYLQKPGQSPQLLIYRVSNRFSGVPDRFSGSGSGTDFTLKISRVEPEDLGVYYCLQSSHFPWTFGGGTKLELKGGGGSDKTHTCPPCPAPELLGGPSVFLFPPKPKDTLMISRTPEVTCVVVDVSHEDPEVKFNWYVDGVEVHNAKTKPREEQYASTYRVVSVLTVLHQDWLNGKEYKCKVSNKALPAPIEKTISKAKGQPREPQVYTLPPCREEMTKNQVSLWCLVKGFYPSDIAVEWESNGQPENNYKTTPPVLDSDGSFFLYSKLTVDKSRWQQGNVFSCSVMHEALHNRYTQKSLSLSPGK

SEQ ID NO: 523 - protein, 481 aa, Artificial Sequence
  Description of Artificial Sequence: Synthetic polypeptide
QVQLVESGGGVVQPGRSLRLSCAASGFTFSKNGMHWVRQAPGKGLEWVAMIYYDSSKMYYADTVKGRFTISRDNSKNTLYLQMNSLRAEDTAVYYCASFYYDLDFDHWGQGTMVTVSSGGGGSGGGGSGGGGSGGGGSDIVMTQTPLSSPVTLGQPASISCRSSQSLVRSDGTTYFNWYQQRPGQPPRLLIYRVSNRFSGVPDRFSGSGAGTDFTLKISRVEAEDVGVYYCLQSSHFPWTFGGGTKVEIKGGGSDKTHTCPPCPAPELLGGPSVFLFPPKPKDTLMISRTPEVTCVVVDVSHEDPEVKFNWYVDGVEVHNAKTKPREEQYASTYRVVSVLTVLHQDWLNGKEYKCKVSNKALPAPIEKTISKAKGQPREPQVYTLPPCREEMTKNQVSLWCLVKGFYPSDIAVEWESNGQPENNYKTTPPVLDSDGSFFLYSKLTVDKSRWQQGNVFSCSVMHEALHNHYTQKSLSLSPGK

SEQ ID NO: 524 - protein, 481 aa, Artificial Sequence
  Description of Artificial Sequence: Synthetic polypeptide
QVQLVESGGGVVQPGRSLRLSCAASGFTFSKNGMHWVRQAPGKGLEWVAMIYYDSSKMYYADTVKGRFTISRDNSKNTLYLQMNSLRAEDTAVYYCASFSSDLDFDHWGQGTMVTVSSGGGGSGGGGSGGGGSGGGGSDIVMTQTPLSSPVTLGQPASISCRSSQSLVRSDGTTYFNWYQQRPGQPPRLLIYRVSNRFSGVPDRFSGSGAGTDFTLKISRVEAEDVGVYYCLQSSHFPWTFGGGTKVEIKGGGSDKTHTCPPCPAPELLGGPSVFLFPPKPKDTLMISRTPEVTCVVVDVSHEDPEVKFNWYVDGVEVHNAKTKPREEQYASTYRVVSVLTVLHQDWLNGKEYKCKVSNKALPAPIEKTISKAKGQPREPQVYTLPPCREEMTKNQVSLWCLVKGFYPSDIAVEWESNGQPENNYKTTPPVLDSDGSFFLYSKLTVDKSRWQQGNVFSCSVMHEALHNHYTQKSLSLSPGK

SEQ ID NO: 525 - protein, 481 aa, Artificial Sequence
  Description of Artificial Sequence: Synthetic polypeptide
QVQLVESGGGVVQPGRSLRLSCAASGFTFSKNGMHWVRQAPGKGLEWVAMIYYDSSKMYYADTVKGRFTISRDNSKNTLYLQMNSLRAEDTAVYYCASFWSDLDFDHWGQGTMVTVSSGGGGSGGGGSGGGGSGGGGSDIVMTQTPLSSPVTLGQPASISCRSSQSLVRSDGTTYFNWYQQRPGQPPRLLIYRVSNRFSGVPDRFSGSGAGTDFTLKISRVEAEDVGVYYCLQSSHFPWTFGGGTKVEIKGGGSDKTHTCPPCPAPELLGGPSVFLFPPKPKDTLMISRTPEVTCVVVDVSHEDPEVKFNWYVDGVEVHNAKTKPREEQYASTYRVVSVLTVLHQDWLNGKEYKCKVSNKALPAPIEKTISKAKGQPREPQVYTLPPCREEMTKNQVSLWCLVKGFYPSDIAVEWESNGQPENNYKTTPPVLDSDGSFFLYSKLTVDKSRWQQGNVFSCSVMHEALHNHYTQKSLSLSPGK

SEQ ID NO: 526 - protein, 481 aa, Artificial Sequence
  Description of Artificial Sequence: Synthetic polypeptide
QVQLVESGGGVVQPGRSLRLSCAASGFTFSKNGMHWVRQAPGKGLEWVAMIYYDSSKMYYADTVKGRFTISRDNSKNTLYLQMNSLRAEDTAVYYCASFSWDLDFDHWGQGTMVTVSSGGGGSGGGGSGGGGSGGGGSDIVMTQTPLSSPVTLGQPASISCRSSQSLVRSDGTTYFNWYQQRPGQPPRLLIYRVSNRFSGVPDRFSGSGAGTDFTLKISRVEAEDVGVYYCLQSSHFPWTFGGGTKVEIKGGGSDKTHTCPPCPAPELLGGPSVFLFPPKPKDTLMISRTPEVTCVVVDVSHEDPEVKFNWYVDGVEVHNAKTKPREEQYASTYRVVSVLTVLHQDWLNGKEYKCKVSNKALPAPIEKTISKAKGQPREPQVYTLPPCREEMTKNQVSLWCLVKGFYPSDIAVEWESNGQPENNYKTTPPVLDSDGSFFLYSKLTVDKSRWQQGNVFSCSVMHEALHNHYTQKSLSLSPGK

SEQ ID NO: 527 - protein, 481 aa, Artificial Sequence
  Description of Artificial Sequence: Synthetic polypeptide
QVQLVESGGGVVQPGRSLRLSCAASGFTFSKNGMHWVRQAPGKGLEWVAMIYYDSSKMYYADTVKGRFTISRDNSKNTLYLQMNSLRAEDTAVYYCASFTTDLDFDHWGQGTMVTVSSGGGGSGGGGSGGGGSGGGGSDIVMTQTPLSSPVTLGQPASISCRSSQSLVRSDGTTYFNWYQQRPGQPPRLLIYRVSNRFSGVPDRFSGSGAGTDFTLKISRVEAEDVGVYYCLQSSHFPWTFGGGTKVEIKGGGSDKTHTCPPCPAPELLGGPSVFLFPPKPKDTLMISRTPEVTCVVVDVSHEDPEVKFNWYVDGVEVHNAKTKPREEQYASTYRVVSVLTVLHQDWLNGKEYKCKVSNKALPAPIEKTISKAKGQPREPQVYTLPPCREEMTKNQVSLWCLVKGFYPSDIAVEWESNGQPENNYKTTPPVLDSDGSFFLYSKLTVDKSRWQQGNVFSCSVMHEALHNHYTQKSLSLSPGK

SEQ ID NO: 528 - protein, 481 aa, Artificial Sequence
  Description of Artificial Sequence: Synthetic polypeptide
QVQLVESGGGVVQPGRSLRLSCAASGFTFSKNGMHWVRQAPGKGLEWVAMIYYDSSKMYYADTVKGRFTISRDNSKNTLYLQMNSLRAEDTAVYYCASFTWDLDFDHWGQGTMVTVSSGGGGSGGGGSGGGGSGGGGSDIVMTQTPLSSPVTLGQPASISCRSSQSLVRSDGTTYFNWYQQRPGQPPRLLIYRVSNRFSGVPDRFSGSGAGTDFTLKISRVEAEDVGVYYCLQSSHFPWTFGGGTKVEIKGGGSDKTHTCPPCPAPELLGGPSVFLFPPKPKDTLMISRTPEVTCVVVDVSHEDPEVKFNWYVDGVEVHNAKTKPREEQYASTYRVVSVLTVLHQDWLNGKEYKCKVSNKALPAPIEKTISKAKGQPREPQVYTLPPCREEMTKNQVSLWCLVKGFYPSDIAVEWESNGQPENNYKTTPPVLDSDGSFFLYSKLTVDKSRWQQGNVFSCSVMHEALHNHYTQKSLSLSPGK

SEQ ID NO: 529 - protein, 481 aa, Artificial Sequence
  Description of Artificial Sequence: Synthetic polypeptide
QVQLVESGGGVVQPGRSLRLSCAASGFTFSKNGMHWVRQAPGKGLEWVAMIYYDSSKMYYADTVKGRFTISRDNSKNTLYLQMNSLRAEDTAVYYCASFWTDLDFDHWGQGTMVTVSSGGGGSGGGGSGGGGSGGGGSDIVMTQTPLSSPVTLGQPASISCRSSQSLVRSDGTTYFNWYQQRPGQPPRLLIYRVSNRFSGVPDRFSGSGAGTDFTLKISRVEAEDVGVYYCLQSSHFPWTFGGGTKVEIKGGGSDKTHTCPPCPAPELLGGPSVFLFPPKPKDTLMISRTPEVTCVVVDVSHEDPEVKFNWYVDGVEVHNAKTKPREEQYASTYRVVSVLTVLHQDWLNGKEYKCKVSNKALPAPIEKTISKAKGQPREPQVYTLPPCREEMTKNQVSLWCLVKGFYPSDIAVEWESNGQPENNYKTTPPVLDSDGSFFLYSKLTVDKSRWQQGNVFSCSVMHEALHNHYTQKSLSLSPGK

SEQ ID NO: 530 - protein, 481 aa, Artificial Sequence
  Description of Artificial Sequence: Synthetic polypeptide
QVQLVESGGGVVQPGRSLRLSCAASGFTFSKNGMHWVRQAPGKGLEWVAMIYYDSSKMYYADTVKGRFTISRDNSKNTLYLQMNSLRAEDTAVYYCASFWWDLDFDHWGQGTMVTVSSGGGGSGGGGSGGGGSGGGGSEIVLTQSPGTLSLSPGERATLSCRSSQSLVRSEGTTYFNWYQQKPGQAPRLLIYRVSNRFSGIPDRFSGSGSGTDFTLTISRLEPEDLAVYYCLQSSHFPWTFGGGTKVEIKGGGSDKTHTCPPCPAPELLGGPSVFLFPPKPKDTLMISRTPEVTCVVVDVSHEDPEVKFNWYVDGVEVHNAKTKPREEQYASTYRVVSVLTVLHQDWLNGKEYKCKVSNKALPAPIEKTISKAKGQPREPQVYTLPPCREEMTKNQVSLWCLVKGFYPSDIAVEWESNGQPENNYKTTPPVLDSDGSFFLYSKLTVDKSRWQQGNVFSCSVMHEALHNHYTQKSLSLSPGK

SEQ ID NO: 531 - protein, 481 aa, Artificial Sequence
  Description of Artificial Sequence: Synthetic polypeptide
QVQLVQSGAEVKKPGASVKVSCKASGFTFSKQGMHWVRQAPGQGLEWMGMIYYDSSKMYYADTVKGRVTMTRDTSTNTLYMELSSLRSEDTAVYYCASFWWDLDFDHWGQGTMVTVSSGGGGSGGGGSGGGGSGGGGSDIVMTQTPLSSPVTLGQPASISCRSSQSLVRSDGTTYFNWYQQRPGQPPRLLIYRVSNRFSGVPDRFSGSGAGTDFTLKISRVEAEDVGVYYCLQSSHFPWTFGGGTKVEIKGGGSDKTHTCPPCPAPELLGGPSVFLFPPKPKDTLMISRTPEVTCVVVDVSHEDPEVKFNWYVDGVEVHNAKTKPREEQYASTYRVVSVLTVLHQDWLNGKEYKCKVSNKALPAPIEKTISKAKGQPREPQVYTLPPCREEMTKNQVSLWCLVKGFYPSDIAVEWESNGQPENNYKTTPPVLDSDGSFFLYSKLTVDKSRWQQGNVFSCSVMHEALHNHYTQKSLSLSPGK

SEQ ID NO: 532 - protein, 481 aa, Artificial Sequence
  Description of Artificial Sequence: Synthetic polypeptide
QVQLVESGGGVVQPGRSLRLSCAASGFTFSKNGMHWVRQAPGKGLEWVAMIYYDSSKMYYADTVKGRFTISRDNSKNTLYLQMNSLRAEDTAVYYCASFWWDLDFDHWGQGTMVTVSSGGGGSGGGGSGGGGSGGGGSDIQMTQSPSSLSASVGDRVTITCRSSQSLVRSEGTTYFNWYQQKPGKAPKLLIYRVSNRFSGVPSRFSGSGSGTDFTLTISSLQPEDFATYYCLQSSHFPWTFGGGTKVEIKGGGSDKTHTCPPCPAPELLGGPSVFLFPPKPKDTLMISRTPEVTCVVVDVSHEDPEVKFNWYVDGVEVHNAKTKPREEQYASTYRVVSVLTVLHQDWLNGKEYKCKVSNKALPAPIEKTISKAKGQPREPQVYTLPPCREEMTKNQVSLWCLVKGFYPSDIAVEWESNGQPENNYKTTPPVLDSDGSFFLYSKLTVDKSRWQQGNVFSCSVMHEALHNHYTQKSLSLSPGK

SEQ ID NO: 533 - protein, 481 aa, Artificial Sequence
  Description of Artificial Sequence: Synthetic polypeptide
EVQLVQSGAEVKKPGESLKISCKGSGFTFSKQGMHWVRQMPGKGLEWMGMIYYDSSKMYYADTVKGQVTISRDNSINTLYLQWSSLKASDTAMYYCASFWWDLDFDHWGQGTMVTVSSGGGGSGGGGSGGGGSGGGGSDIVMTQTPLSSPVTLGQPASISCRSSQSLVRSDGTTYFNWYQQRPGQPPRLLIYRVSNRFSGVPDRFSGSGAGTDFTLKISRVEAEDVGVYYCLQSSHFPWTFGGGTKVEIKGGGSDKTHTCPPCPAPELLGGPSVFLFPPKPKDTLMISRTPEVTCVVVDVSHEDPEVKFNWYVDGVEVHNAKTKPREEQYASTYRVVSVLTVLHQDWLNGKEYKCKVSNKALPAPIEKTISKAKGQPREPQVYTLPPCREEMTKNQVSLWCLVKGFYPSDIAVEWESNGQPENNYKTTPPVLDSDGSFFLYSKLTVDKSRWQQGNVFSCSVMHEALHNHYTQKSLSLSPGK

SEQ ID NO: 534 - protein, 713 aa, Artificial Sequence
  Description of Artificial Sequence: Synthetic polypeptide
EVQLVQSGAEVKKPGESLKISCKASGYSFTNYWMNWVRQMPGKGLEWMGMIHPSDSEIRLNQKFQGQVTLSVDKSIGTAYMQWSSLKASDTAMYYCSRWYYLSSPMDYWGQGTTVTVSSASTKGPSVFPLAPSSKSTSGGTAALGCLVKDYFPEPVTVSWNSGALTSGVHTFPAVLQSSGLYSLSSVVTVPSSSLGTQTYICNVNHKPSNTKVDKRVEPKSCGGGGSGGGGSEIVMTQSPSTLSASVGDRVIITCKASQNINNYLNWYQQKPGKAPKLLIYNTDHLQAGVPSRFSGSGSGAEFTLTISSLQPDDFATYYCLQHRSRYTFGQGTKLTVLGGGGGSGGGGSGGGGSGGGGSEVQLVESGGGLVQPGGSLRLSCAASGFSLTTYNVHWVRQAPGKGLEWVGRMRYSGDTSFNAALTSRFTISRDNSKNTLYLQMNSLRAEDTAVYYCASDPMYIPNYAYGVMNAWGQGTLVTVSSGGGSDKTHTCPPCPAPELLGGPSVFLFPPKPKDTLMISRTPEVTCVVVAVSHEDPEVKFNWYVDGVEVHNAKTKPREEQYASTYRVVSVLTVLHQDWLNGKEYKCKVSNKALAAPIEKTISKAKGQPREPQVCTLPPSREEMTKNQVSLSCAVKGFYPSDIAVEWESNGQPENNYKTTPPVLDSDGSFFLVSKLTVDKSRWQQGNVFSCSVMHEALHNHYTQKSLSLSPGK

SEQ ID NO: 535 - protein, 713 aa, Artificial Sequence
  Description of Artificial Sequence: Synthetic polypeptide
EVQLVQSGAEVKKPGESLKISCKASGYSFTNYWMNWVRQMPGKGLEWMGMIHPSDSEIRLNQKFQGQVTLSVDKSIGTAYMQWSSLKASDTAMYYCSRWYYLSSPMDYWGQGTTVTVSSASTKGPSVFPLAPSSKSTSGGTAALGCLVKDYFPEPVTVSWNSGALTSGVHTFPAVLQSSGLYSLSSVVTVPSSSLGTQTYICNVNHKPSNTKVDKRVEPKSCGGGGSGGGGSEIVMTQSPSTLSASVGDRVIITCKASQNINNYLNWYQQKPGKAPKLLIYNTDHLQAGVPSRFSGSGSGAEFTLTISSLQPDDFATYYCLQHRSRYTFGQGTKLTVLGGGGGSGGGGSGGGGSGGGGSEVQLVETGGGLVQPGGSRRLSCAASGFSLTTYNVHWVRQAPGKGLEWVGRMRYSGDTSFNAALTSRFTISRDTSKNTVYLQMNSLRAEDTGVYYCASDPMYIPNYAYGVMNAWGQGTLVTVSSGGGSDKTHTCPPCPAPELLGGPSVFLFPPKPKDTLMISRTPEVTCVVVAVSHEDPEVKFNWYVDGVEVHNAKTKPREEQYASTYRVVSVLTVLHQDWLNGKEYKCKVSNKALAAPIEKTISKAKGQPREPQVCTLPPSREEMTKNQVSLSCAVKGFYPSDIAVEWESNGQPENNYKTTPPVLDSDGSFFLVSKLTVDKSRWQQGNVFSCSVMHEALHNHYTQKSLSLSPGK

SEQ ID NO: 536 - protein, 713 aa, Artificial Sequence
  Description of Artificial Sequence: Synthetic polypeptide
EVQLVQSGAEVKKPGESLKISCKASGYSFTNYWMNWVRQMPGKGLEWMGMIHPSDSEIRLNQKFQGQVTLSVDKSIGTAYMQWSSLKASDTAMYYCSRWYYLSSPMDYWGQGTTVTVSSASTKGPSVFPLAPSSKSTSGGTAALGCLVKDYFPEPVTVSWNSGALTSGVHTFPAVLQSSGLYSLSSVVTVPSSSLGTQTYICNVNHKPSNTKVDKRVEPKSCGGGGSGGGGSEIVMTQSPSTLSASVGDRVIITCKASQNINNYLNWYQQKPGKAPKLLIYNTDHLQAGVPSRFSGSGSGAEFTLTISSLQPDDFATYYCLQHRSRYTFGQGTKLTVLGGGGGSGGGGSGGGGSGGGGSEVQLVETGGGLVQPGGSRRLSCAASGFSLTTYNVHWVRQAPGKGLEWVSRMRYSGDTSFNAALTSRFTISRDTSKNTVYLQMNSLRAEDTGVYYCASDPMYIPNYAYGVMNAWGQGTLVTVSSGGGSDKTHTCPPCPAPELLGGPSVFLFPPKPKDTLMISRTPEVTCVVVAVSHEDPEVKFNWYVDGVEVHNAKTKPREEQYASTYRVVSVLTVLHQDWLNGKEYKCKVSNKALAAPIEKTISKAKGQPREPQVCTLPPSREEMTKNQVSLSCAVKGFYPSDIAVEWESNGQPENNYKTTPPVLDSDGSFFLVSKLTVDKSRWQQGNVFSCSVMHEALHNHYTQKSLSLSPGK

SEQ ID NO: 537 - protein, 713 aa, Artificial Sequence
  Description of Artificial Sequence: Synthetic polypeptide
EVQLVQSGAEVKKPGESLKISCKASGYSFTNYWMNWVRQMPGKGLEWMGMIHPSDSEIRLNQKFQGQVTLSVDKSIGTAYMQWSSLKASDTAMYYCSRWYYLSSPMDYWGQGTTVTVSSASTKGPSVFPLAPSSKSTSGGTAALGCLVKDYFPEPVTVSWNSGALTSGVHTFPAVLQSSGLYSLSSVVTVPSSSLGTQTYICNVNHKPSNTKVDKRVEPKSCGGGGSGGGGSEIVMTQSPSTLSASVGDRVIITCKASQNINNYLNWYQQKPGKAPKLLIYNTDHLQAGVPSRFSGSGSGAEFTLTISSLQPDDFATYYCLQHRSRYTFGQGTKLTVLGGGGGSGGGGSGGGGSGGGGSEVQLVESGGGLVQPGGSLRLSCAASGFSLTTYNVHWVRQAPGKGLEWVSRMRYSGDTSFNAALTSRFTISRDNSKNTLYLQMNSLRAEDTAVYYCASDPMYIPNYAYGVMNAWGQGTLVTVSSGGGSDKTHTCPPCPAPELLGGPSVFLFPPKPKDTLMISRTPEVTCVVVAVSHEDPEVKFNWYVDGVEVHNAKTKPREEQYASTYRVVSVLTVLHQDWLNGKEYKCKVSNKALAAPIEKTISKAKGQPREPQVCTLPPSREEMTKNQVSLSCAVKGFYPSDIAVEWESNGQPENNYKTTPPVLDSDGSFFLVSKLTVDKSRWQQGNVFSCSVMHEALHNHYTQKSLSLSPGK

SEQ ID NO: 538 - protein, 713 aa, Artificial Sequence
  Description of Artificial Sequence: Synthetic polypeptide
EVQLVQSGAEVKKPGESLKISCKASGYSFTNYWMNWVRQMPGKGLEWMGMIHPSDSEIRLNQKFQGQVTLSVDKSIGTAYMQWSSLKASDTAMYYCSRWYYLSSPMDYWGQGTTVTVSSASTKGPSVFPLAPSSKSTSGGTAALGCLVKDYFPEPVTVSWNSGALTSGVHTFPAVLQSSGLYSLSSVVTVPSSSLGTQTYICNVNHKPSNTKVDKRVEPKSCGGGGSGGGGSEVQLVESGGGSVQPGGSLRLSCTASGFSLTTYNVHWVRQAPGKGLEWVGRMRYSGDTSFNAALTSRFTISRDTSKNTVYLQMNSLRAEDTATYYCASDPMYIPNYAYGVMNAWGQGTTVTVSSGGGGGSGGGGSGGGGSGGGGSEIVMTQSPSTLSASVGDRVIITCKASQNINNYLNWYQQKPGKAPKLLIYNTDHLQAGVPSRFSGSGSGAEFTLTISSLQPDDFATYYCLQHRSRYTFGQGTKLTVLGGGSDKTHTCPPCPAPELLGGPSVFLFPPKPKDTLMISRTPEVTCVVVAVSHEDPEVKFNWYVDGVEVHNAKTKPREEQYASTYRVVSVLTVLHQDWLNGKEYKCKVSNKALAAPIEKTISKAKGQPREPQVCTLPPSREEMTKNQVSLSCAVKGFYPSDIAVEWESNGQPENNYKTTPPVLDSDGSFFLVSKLTVDKSRWQQGNVFSCSVMHEALHNHYTQKSLSLSPGK

SEQ ID NO: 539 - protein, 713 aa, Artificial Sequence
  Description of Artificial Sequence: Synthetic polypeptide
EVQLVQSGAEVKKPGESLKISCKASGYSFTNYWMNWVRQMPGKGLEWMGMIHPSDSEIRLNQKFQGQVTLSVDKSIGTAYMQWSSLKASDTAMYYCSRWYYLSSPMDYWGQGTTVTVSSASTKGPSVFPLAPSSKSTSGGTAALGCLVKDYFPEPVTVSWNSGALTSGVHTFPAVLQSSGLYSLSSVVTVPSSSLGTQTYICNVNHKPSNTKVDKRVEPKSCGGGGSGGGGSEIVMTQSPSTLSASVGDRVIITCKASQNINNYLNWYQQKPGKAPKLLIYNTDHLQAGVPSRFSGSGSGAEFTLTISSLQPDDFATYYCLQHRSRYTFGQGTKLTVLGGGGGSGGGGSGGGGSGGGGSEVQLVESGGGSVQPGGSLRLSCTASGFSLTTYNVHWVRQAPGKGLEWVGRMRYSGDTSFNAALTSRFTISRDTSKNTVYLQMNSLRAEDTATYYCASDPMYIPNYAYGVMNAWGQGTTVTVSSGGGSDKTHTCPPCPAPELLGGPSVFLFPPKPKDTLMISRTPEVTCVVVAVSHEDPEVKFNWYVDGVEVHNAKTKPREEQYASTYRVVSVLTVLHQDWLNGKEYKCKVSNKALAAPIEKTISKAKGQPREPQVCTLPPSREEMTKNQVSLSCAVKGFYPSDIAVEWESNGQPENNYKTTPPVLDSDGSFFLVSKLTVDKSRWQQGNVFSCSVMHEALHNHYTQKSLSLSPGK

SEQ ID NO: 540 - protein, 227 aa, Artificial Sequence
  Description of Artificial Sequence: Synthetic polypeptide
DKTHTCPPCPAPELLGGPSVFLFPPKPKDTLMISRTPEVTCVVVAVSHEDPEVKFNWYVDGVEVHNAKTKPREEQYASTYRVVSVLTVLHQDWLNGKEYKCKVSNKALAAPIEKTISKAKGQPREPQVYTLPPCREEMTKNQVSLWCLVKGFYPSDIAVEWESNGQPENNYKTTPPVLDSDGSFFLYSKLTVDKSRWQQGNVFSCSVMHEALHNRYTQKSLSLSPGK

SEQ ID NO: 541 - protein, 11 aa, Artificial Sequence
  Description of Artificial Sequence: Synthetic peptide
ASSSSDLDFDH

SEQ ID NO: 542 - protein, 11 aa, Artificial Sequence
  Description of Artificial Sequence: Synthetic peptide
ASSSWDLDFDH

SEQ ID NO: 543 - protein, 11 aa, Artificial Sequence
  Description of Artificial Sequence: Synthetic peptide
ASSTTDLDFDH

SEQ ID NO: 544 - protein, 11 aa, Artificial Sequence
  Description of Artificial Sequence: Synthetic peptide
ASSTWDLDFDH

SEQ ID NO: 545 - protein, 11 aa, Artificial Sequence
  Description of Artificial Sequence: Synthetic peptide
ASSWSDLDFDH

SEQ ID NO: 546 - protein, 11 aa, Artificial Sequence
  Description of Artificial Sequence: Synthetic peptide
ASSWWDLDFDH

SEQ ID NO: 547 - protein, 11 aa, Artificial Sequence
  Description of Artificial Sequence: Synthetic peptide
ASSYYDLDFDH

SEQ ID NO: 548 - protein, 11 aa, Artificial Sequence
  Description of Artificial Sequence: Synthetic peptide
ASYSSDLDFDH

SEQ ID NO: 549 - protein, 11 aa, Artificial Sequence
  Description of Artificial Sequence: Synthetic peptide
ASYSWDLDFDH

SEQ ID NO: 550 - protein, 11 aa, Artificial Sequence
  Description of Artificial Sequence: Synthetic peptide
ASYTTDLDFDH

SEQ ID NO: 551 - protein, 11 aa, Artificial Sequence
  Description of Artificial Sequence: Synthetic peptide
ASYTWDLDFDH

SEQ ID NO: 552 - protein, 11 aa, Artificial Sequence
  Description of Artificial Sequence: Synthetic peptide
ASYWSDLDFDH

SEQ ID NO: 553 - protein, 11 aa, Artificial Sequence
  Description of Artificial Sequence: Synthetic peptide
ASYWWDLDFDH

SEQ ID NO: 554 - protein, 11 aa, Artificial Sequence
  Description of Artificial Sequence: Synthetic peptide
ASYYYDLDFDH

SEQ ID NO: 555 - protein, 112 aa, Artificial Sequence
  Description of Artificial Sequence: Synthetic polypeptide
DIQMTQSPSSLSASVGDRVTITCRSSQSLVRSDGTTYFNWYQQKPGKAPKLLIYRVSNRFSGVPSRFSGSGSGTDFTLTISSLQPEDFATYYCLQSSHFPWTFGGGTKVEIK

SEQ ID NO: 556 - protein, 112 aa, Artificial Sequence
  Description of Artificial Sequence: Synthetic polypeptide
EIVLTQSPGTLSLSPGERATLSCRSSQSLVRSDGTTYFNWYQQKPGQAPRLLIYRVSNRFSGIPDRFSGSGSGTDFTLTISRLEPEDLAVYYCLQSSHFPWTFGGGTKVEIK

SEQ ID NO: 557 - protein, 118 aa, Artificial Sequence
  Description of Artificial Sequence: Synthetic polypeptide
EVQLVQSGAEVKKPGESLKISCKGSGFTFSKNGMHWVRQMPGKGLEWMGMIYYDSSKMYYADTVKGQVTISRDNSINTLYLQWSSLKASDTAMYYCASFSWDLDFDHWGQGTMVTVSS

SEQ ID NO: 558 - protein, 118 aa, Artificial Sequence
  Description of Artificial Sequence: Synthetic polypeptide
EVQLVQSGAEVKKPGESLKISCKGSGFTFSKNGMHWVRQMPGKGLEWMGMIYYDSSKMYYADTVKGQVTISRDNSINTLYLQWSSLKASDTAMYYCASSSWDLDFDHWGQGTMVTVSS

SEQ ID NO: 559 - protein, 118 aa, Artificial Sequence
  Description of Artificial Sequence: Synthetic polypeptide
EVQLVQSGAEVKKPGESLKISCKGSGFTFSKNGMHWVRQMPGKGLEWMGMIYYDSSKMYYADTVKGQVTISRDNSINTLYLQWSSLKASDTAMYYCASSWWDLDFDHWGQGTMVTVSS

SEQ ID NO: 560 - protein, 118 aa, Artificial Sequence
  Description of Artificial Sequence: Synthetic polypeptide
EVQLVQSGAEVKKPGESLKISCKGSGFTFSKNGMHWVRQMPGKGLEWMGMIYYDSSKMYYADTVKGQVTISRDNSINTLYLQWSSLKASDTAMYYCASYSWDLDFDHWGQGTMVTVSS

SEQ ID NO: 561 - protein, 118 aa, Artificial Sequence
  Description of Artificial Sequence: Synthetic polypeptide
EVQLVQSGAEVKKPGESLKISCKGSGFTFSKNGMHWVRQMPGKGLEWMGMIYYDSSKMYYADTVKGQVTISRDNSINTLYLQWSSLKASDTAMYYCASYWWDLDFDHWGQGTMVTVSS

SEQ ID NO: 562 - protein, 118 aa, Artificial Sequence
  Description of Artificial Sequence: Synthetic polypeptide
EVQLVQSGAEVKKPGESLKISCKGSGFTFSKQGMHWVRQMPGKGLEWMGMIYYDSSKMYYADTVKGQVTISRDNSINTLYLQWSSLKASDTAMYYCASFSWDLDFDHWGQGTMVTVSS

SEQ ID NO: 563 - protein, 118 aa, Artificial Sequence
  Description of Artificial Sequence: Synthetic polypeptide
EVQLVQSGAEVKKPGESLKISCKGSGFTFSKQGMHWVRQMPGKGLEWMGMIYYDSSKMYYADTVKGQVTISRDNSINTLYLQWSSLKASDTAMYYCASSSWDLDFDHWGQGTMVTVSS

SEQ ID NO: 564 - protein, 118 aa, Artificial Sequence
  Description of Artificial Sequence: Synthetic polypeptide
EVQLVQSGAEVKKPGESLKISCKGSGFTFSKQGMHWVRQMPGKGLEWMGMIYYDSSKMYYADTVKGQVTISRDNSINTLYLQWSSLKASDTAMYYCASSWWDLDFDHWGQGTMVTVSS

SEQ ID NO: 565 - protein, 118 aa, Artificial Sequence
  Description of Artificial Sequence: Synthetic polypeptide
EVQLVQSGAEVKKPGESLKISCKGSGFTFSKQGMHWVRQMPGKGLEWMGMIYYDSSKMYYADTVKGQVTISRDNSINTLYLQWSSLKASDTAMYYCASYSWDLDFDHWGQGTMVTVSS

SEQ ID NO: 566 - protein, 118 aa, Artificial Sequence
  Description of Artificial Sequence: Synthetic polypeptide
EVQLVQSGAEVKKPGESLKISCKGSGFTFSKQGMHWVRQMPGKGLEWMGMIYYDSSKMYYADTVKGQVTISRDNSINTLYLQWSSLKASDTAMYYCASYWWDLDFDHWGQGTMVTVSS

SEQ ID NO: 567 - protein, 9 aa, Artificial Sequence
  Description of Artificial Sequence: Synthetic peptide
FWWDLDFDH

SEQ ID NO: 568 - protein, 11 aa, Artificial Sequence
  Description of Artificial Sequence: Synthetic peptide
QSLVRSDETTY

SEQ ID NO: 569 - protein, 118 aa, Artificial Sequence
  Description of Artificial Sequence: Synthetic polypeptide
QVQLVESGGGVVQPGRSLRLSCAASGFTFSKNGMHWVRQAPGKGLEWVAMIYYDSSKMYYADTVKGRFTISRDNSKNTLYLQMNSLRAEDTAVYYCASSWSDLDFDHWGQGTMVTVSS

SEQ ID NO: 570 - protein, 118 aa, Artificial Sequence
  Description of Artificial Sequence: Synthetic polypeptide
QVQLVESGGGVVQPGRSLRLSCAASGFTFSKNGMHWVRQAPGKGLEWVAMIYYDSSKMYYADTVKGRFTISRDNSKNTLYLQMNSLRAEDTAVYYCASYSSDLDFDHWGQGTMVTVSS

SEQ ID NO: 571 - protein, 118 aa, Artificial Sequence
  Description of Artificial Sequence: Synthetic polypeptide
QVQLVESGGGVVQPGRSLRLSCAASGFTFSKNGMHWVRQAPGKGLEWVAMIYYDSSKMYYADTVKGRFTISRDNSKNTLYLQMNSLRAEDTAVYYCASYYYDLDFDHWGQGTMVTVSS

SEQ ID NO: 572 - protein, 118 aa, Artificial Sequence
  Description of Artificial Sequence: Synthetic polypeptide
QVQLVESGGGVVQPGRSLRLSCAASGFTFSKNGMHWVRQAPGKGLEWVAMIYYDSSKMYYADTVKGRFTISRDNSKNTLYLQMNSLRAEDTAVYYCASSSSDLDFDHWGQGTMVTVSS

SEQ ID NO: 573 - protein, 118 aa, Artificial Sequence
  Description of Artificial Sequence: Synthetic polypeptide
QVQLVESGGGVVQPGRSLRLSCAASGFTFSKNGMHWVRQAPGKGLEWVAMIYYDSSKMYYADTVKGRFTISRDNSKNTLYLQMNSLRAEDTAVYYCASSSWDLDFDHWGQGTMVTVSS

SEQ ID NO: 574 - protein, 118 aa, Artificial Sequence
  Description of Artificial Sequence: Synthetic polypeptide
QVQLVESGGGVVQPGRSLRLSCAASGFTFSKNGMHWVRQAPGKGLEWVAMIYYDSSKMYYADTVKGRFTISRDNSKNTLYLQMNSLRAEDTAVYYCASSTTDLDFDHWGQGTMVTVSS

SEQ ID NO: 575 - protein, 118 aa, Artificial Sequence
  Description of Artificial Sequence: Synthetic polypeptide
QVQLVESGGGVVQPGRSLRLSCAASGFTFSKNGMHWVRQAPGKGLEWVAMIYYDSSKMYYADTVKGRFTISRDNSKNTLYLQMNSLRAEDTAVYYCASSTWDLDFDHWGQGTMVTVSS

SEQ ID NO: 576 - protein, 118 aa, Artificial Sequence
  Description of Artificial Sequence: Synthetic polypeptide
QVQLVESGGGVVQPGRSLRLSCAASGFTFSKNGMHWVRQAPGKGLEWVAMIYYDSSKMYYADTVKGRFTISRDNSKNTLYLQMNSLRAEDTAVYYCASSWWDLDFDHWGQGTMVTVSS

SEQ ID NO: 577 - protein, 118 aa, Artificial Sequence
  Description of Artificial Sequence: Synthetic polypeptide
QVQLVESGGGVVQPGRSLRLSCAASGFTFSKNGMHWVRQAPGKGLEWVAMIYYDSSKMYYADTVKGRFTISRDNSKNTLYLQMNSLRAEDTAVYYCASSYYDLDFDHWGQGTMVTVSS

SEQ ID NO: 578 - protein, 118 aa, Artificial Sequence
  Description of Artificial Sequence: Synthetic polypeptide
QVQLVESGGGVVQPGRSLRLSCAASGFTFSKNGMHWVRQAPGKGLEWVAMIYYDSSKMYYADTVKGRFTISRDNSKNTLYLQMNSLRAEDTAVYYCASYSWDLDFDHWGQGTMVTVSS

SEQ ID NO: 579 - protein, 118 aa, Artificial Sequence
  Description of Artificial Sequence: Synthetic polypeptide
QVQLVESGGGVVQPGRSLRLSCAASGFTFSKNGMHWVRQAPGKGLEWVAMIYYDSSKMYYADTVKGRFTISRDNSKNTLYLQMNSLRAEDTAVYYCASYTTDLDFDHWGQGTMVTVSS

SEQ ID NO: 580 - protein, 118 aa, Artificial Sequence
  Description of Artificial Sequence: Synthetic polypeptide
QVQLVESGGGVVQPGRSLRLSCAASGFTFSKNGMHWVRQAPGKGLEWVAMIYYDSSKMYYADTVKGRFTISRDNSKNTLYLQMNSLRAEDTAVYYCASYTWDLDFDHWGQGTMVTVSS

SEQ ID NO: 581 - protein, 118 aa, Artificial Sequence
  Description of Artificial Sequence: Synthetic polypeptide
QVQLVESGGGVVQPGRSLRLSCAASGFTFSKNGMHWVRQAPGKGLEWVAMIYYDSSKMYYADTVKGRFTISRDNSKNTLYLQMNSLRAEDTAVYYCASYWSDLDFDHWGQGTMVTVSS

SEQ ID NO: 582 - protein, 118 aa, Artificial Sequence
  Description of Artificial Sequence: Synthetic polypeptide
QVQLVESGGGVVQPGRSLRLSCAASGFTFSKNGMHWVRQAPGKGLEWVAMIYYDSSKMYYADTVKGRFTISRDNSKNTLYLQMNSLRAEDTAVYYCASYWWDLDFDHWGQGTMVTVSS

SEQ ID NO: 583 - protein, 118 aa, Artificial Sequence
  Description of Artificial Sequence: Synthetic polypeptide
QVQLVESGGGVVQPGRSLRLSCAASGFTFSKQGMHWVRQAPGKGLEWVAMIYYDSSKMYYADTVKGRFTISRDNSKNTLYLQMNSLRAEDTAVYYCASFSSDLDFDHWGQGTMVTVSS

SEQ ID NO: 584 - protein, 118 aa, Artificial Sequence
  Description of Artificial Sequence: Synthetic polypeptide
QVQLVESGGGVVQPGRSLRLSCAASGFTFSKQGMHWVRQAPGKGLEWVAMIYYDSSKMYYADTVKGRFTISRDNSKNTLYLQMNSLRAEDTAVYYCASFSWDLDFDHWGQGTMVTVSS

SEQ ID NO: 585 - protein, 118 aa, Artificial Sequence
  Description of Artificial Sequence: Synthetic polypeptide
QVQLVESGGGVVQPGRSLRLSCAASGFTFSKQGMHWVRQAPGKGLEWVAMIYYDSSKMYYADTVKGRFTISRDNSKNTLYLQMNSLRAEDTAVYYCASFTTDLDFDHWGQGTMVTVSS

SEQ ID NO: 586 - protein, 118 aa, Artificial Sequence
  Description of Artificial Sequence: Synthetic polypeptide
QVQLVESGGGVVQPGRSLRLSCAASGFTFSKQGMHWVRQAPGKGLEWVAMIYYDSSKMYYADTVKGRFTISRDNSKNTLYLQMNSLRAEDTAVYYCASFTWDLDFDHWGQGTMVTVSS

SEQ ID NO: 587 - protein, 118 aa, Artificial Sequence
  Description of Artificial Sequence: Synthetic polypeptide
QVQLVESGGGVVQPGRSLRLSCAASGFTFSKQGMHWVRQAPGKGLEWVAMIYYDSSKMYYADTVKGRFTISRDNSKNTLYLQMNSLRAEDTAVYYCASFWSDLDFDHWGQGTMVTVSS

SEQ ID NO: 588 - protein, 118 aa, Artificial Sequence
  Description of Artificial Sequence: Synthetic polypeptide
QVQLVESGGGVVQPGRSLRLSCAASGFTFSKQGMHWVRQAPGKGLEWVAMIYYDSSKMYYADTVKGRFTISRDNSKNTLYLQMNSLRAEDTAVYYCASFYYDLDFDHWGQGTMVTVSS

SEQ ID NO: 589 - protein, 118 aa, Artificial Sequence
  Description of Artificial Sequence: Synthetic polypeptide
QVQLVESGGGVVQPGRSLRLSCAASGFTFSKQGMHWVRQAPGKGLEWVAMIYYDSSKMYYADTVKGRFTISRDNSKNTLYLQMNSLRAEDTAVYYCASSSSDLDFDHWGQGTMVTVSS

SEQ ID NO: 590 - protein, 118 aa, Artificial Sequence
  Description of Artificial Sequence: Synthetic polypeptide
QVQLVESGGGVVQPGRSLRLSCAASGFTFSKQGMHWVRQAPGKGLEWVAMIYYDSSKMYYADTVKGRFTISRDNSKNTLYLQMNSLRAEDTAVYYCASSSWDLDFDHWGQGTMVTVSS

SEQ ID NO: 591 - protein, 118 aa, Artificial Sequence
  Description of Artificial Sequence: Synthetic polypeptide
QVQLVESGGGVVQPGRSLRLSCAASGFTFSKQGMHWVRQAPGKGLEWVAMIYYDSSKMYYADTVKGRFTISRDNSKNTLYLQMNSLRAEDTAVYYCASSTTDLDFDHWGQGTMVTVSS

SEQ ID NO: 592 - protein, 118 aa, Artificial Sequence
  Description of Artificial Sequence: Synthetic polypeptide
QVQLVESGGGVVQPGRSLRLSCAASGFTFSKQGMHWVRQAPGKGLEWVAMIYYDSSKMYYADTVKGRFTISRDNSKNTLYLQMNSLRAEDTAVYYCASSTWDLDFDHWGQGTMVTVSS

SEQ ID NO: 593 - protein, 118 aa, Artificial Sequence
  Description of Artificial Sequence: Synthetic polypeptide
QVQLVESGGGVVQPGRSLRLSCAASGFTFSKQGMHWVRQAPGKGLEWVAMIYYDSSKMYYADTVKGRFTISRDNSKNTLYLQMNSLRAEDTAVYYCASSWSDLDFDHWGQGTMVTVSS

SEQ ID NO: 594 - protein, 118 aa, Artificial Sequence
  Description of Artificial Sequence: Synthetic polypeptide
QVQLVESGGGVVQPGRSLRLSCAASGFTFSKQGMHWVRQAPGKGLEWVAMIYYDSSKMYYADTVKGRFTISRDNSKNTLYLQMNSLRAEDTAVYYCASSWWDLDFDHWGQGTMVTVSS

SEQ ID NO: 595 - protein, 118 aa, Artificial Sequence
  Description of Artificial Sequence: Synthetic polypeptide
QVQLVESGGGVVQPGRSLRLSCAASGFTFSKQGMHWVRQAPGKGLEWVAMIYYDSSKMYYADTVKGRFTISRDNSKNTLYLQMNSLRAEDTAVYYCASSYYDLDFDHWGQGTMVTVSS

SEQ ID NO: 596 - protein, 118 aa, Artificial Sequence
  Description of Artificial Sequence: Synthetic polypeptide
QVQLVESGGGVVQPGRSLRLSCAASGFTFSKQGMHWVRQAPGKGLEWVAMIYYDSSKMYYADTVKGRFTISRDNSKNTLYLQMNSLRAEDTAVYYCASYSSDLDFDHWGQGTMVTVSS

SEQ ID NO: 597 - protein, 118 aa, Artificial Sequence
  Description of Artificial Sequence: Synthetic polypeptide
QVQLVESGGGVVQPGRSLRLSCAASGFTFSKQGMHWVRQAPGKGLEWVAMIYYDSSKMYYADTVKGRFTISRDNSKNTLYLQMNSLRAEDTAVYYCASYSWDLDFDHWGQGTMVTVSS

SEQ ID NO: 598 - protein, 118 aa, Artificial Sequence
  Description of Artificial Sequence: Synthetic polypeptide
QVQLVESGGGVVQPGRSLRLSCAASGFTFSKQGMHWVRQAPGKGLEWVAMIYYDSSKMYYADTVKGRFTISRDNSKNTLYLQMNSLRAEDTAVYYCASYTTDLDFDHWGQGTMVTVSS

SEQ ID NO: 599 - protein, 118 aa, Artificial Sequence
  Description of Artificial Sequence: Synthetic polypeptide
QVQLVESGGGVVQPGRSLRLSCAASGFTFSKQGMHWVRQAPGKGLEWVAMIYYDSSKMYYADTVKGRFTISRDNSKNTLYLQMNSLRAEDTAVYYCASYTWDLDFDHWGQGTMVTVSS

SEQ ID NO: 600 - protein, 118 aa, Artificial Sequence
  Description of Artificial Sequence: Synthetic polypeptide
QVQLVESGGGVVQPGRSLRLSCAASGFTFSKQGMHWVRQAPGKGLEWVAMIYYDSSKMYYADTVKGRFTISRDNSKNTLYLQMNSLRAEDTAVYYCASYWSDLDFDHWGQGTMVTVSS

SEQ ID NO: 601 - protein, 118 aa, Artificial Sequence
  Description of Artificial Sequence: Synthetic polypeptide
QVQLVESGGGVVQPGRSLRLSCAASGFTFSKQGMHWVRQAPGKGLEWVAMIYYDSSKMYYADTVKGRFTISRDNSKNTLYLQMNSLRAEDTAVYYCASYWWDLDFDHWGQGTMVTVSS

SEQ ID NO: 602 - protein, 118 aa, Artificial Sequence
  Description of Artificial Sequence: Synthetic polypeptide
QVQLVESGGGVVQPGRSLRLSCAASGFTFSKQGMHWVRQAPGKGLEWVAMIYYDSSKMYYADTVKGRFTISRDNSKNTLYLQMNSLRAEDTAVYYCASYYYDLDFDHWGQGTMVTVSS

SEQ ID NO: 603 - protein, 118 aa, Artificial Sequence
  Description of Artificial Sequence: Synthetic polypeptide
QVQLVQSGAEVKKPGASVKVSCKASGFTFSKNGMHWVRQAPGQGLEWMGMIYYDSSKMYYADTVKGRVTMTRDTSTNTLYMELSSLRSEDTAVYYCASYSWDLDFDHWGQGTMVTVSS

SEQ ID NO: 604 - protein, 118 aa, Artificial Sequence
  Description of Artificial Sequence: Synthetic polypeptide
QVQLVQSGAEVKKPGASVKVSCKASGFTFSKNGMHWVRQAPGQGLEWMGMIYYDSSKMYYADTVKGRVTMTRDTSTNTLYMELSSLRSEDTAVYYCASYWWDLDFDHWGQGTMVTVSS

SEQ ID NO: 605 - protein, 118 aa, Artificial Sequence
  Description of Artificial Sequence: Synthetic polypeptide
QVQLVQSGAEVKKPGASVKVSCKASGFTFSKQGMHWVRQAPGNGLEWMGMIYYDSSKMYYADTVKGRVTMTRDTSTNTLYMELSSLRSEDTAVYYCASFSWDLDFDHWGQGTMVTVSS

SEQ ID NO: 606 - protein, 118 aa, Artificial Sequence
  Description of Artificial Sequence: Synthetic polypeptide
QVQLVQSGAEVKKPGASVKVSCKASGFTFSKQGMHWVRQAPGNGLEWMGMIYYDSSKMYYADTVKGRVTMTRDTSTNTLYMELSSLRSEDTAVYYCASSSWDLDFDHWGQGTMVTVSS

SEQ ID NO: 607 - protein, 118 aa, Artificial Sequence
  Description of Artificial Sequence: Synthetic polypeptide
QVQLVQSGAEVKKPGASVKVSCKASGFTFSKQGMHWVRQAPGNGLEWMGMIYYDSSKMYYADTVKGRVTMTRDTSTNTLYMELSSLRSEDTAVYYCASSWWDLDFDHWGQGTMVTVSS

SEQ ID NO: 608 - protein, 118 aa, Artificial Sequence
  Description of Artificial Sequence: Synthetic polypeptide
QVQLVQSGAEVKKPGASVKVSCKASGFTFSKQGMHWVRQAPGQGLEWMGMIYYDSSKMYYADTVKGRVTMTRDTSTNTLYMELSSLRSEDTAVYYCASFSWDLDFDHWGQGTMVTVSS

SEQ ID NO: 609 - protein, 118 aa, Artificial Sequence
  Description of Artificial Sequence: Synthetic polypeptide
QVQLVQSGAEVKKPGASVKVSCKASGFTFSKQGMHWVRQAPGQGLEWMGMIYYDSSKMYYADTVKGRVTMTRDTSTNTLYMELSSLRSEDTAVYYCASSSWDLDFDHWGQGTMVTVSS

SEQ ID NO: 610 - protein, 118 aa, Artificial Sequence
  Description of Artificial Sequence: Synthetic polypeptide
QVQLVQSGAEVKKPGASVKVSCKASGFTFSKQGMHWVRQAPGQGLEWMGMIYYDSSKMYYADTVKGRVTMTRDTSTNTLYMELSSLRSEDTAVYYCASSWWDLDFDHWGQGTMVTVSS

SEQ ID NO: 611 - protein, 118 aa, Artificial Sequence
  Description of Artificial Sequence: Synthetic polypeptide
QVQLVQSGAEVKKPGASVKVSCKASGFTFSKQGMHWVRQAPGQGLEWMGMIYYDSSKMYYADTVKGRVTMTRDTSTNTLYMELSSLRSEDTAVYYCASYSWDLDFDHWGQGTMVTVSS

SEQ ID NO: 612 - protein, 118 aa, Artificial Sequence
  Description of Artificial Sequence: Synthetic polypeptide
QVQLVQSGAEVKKPGASVKVSCKASGFTFSKQGMHWVRQAPGQGLEWMGMIYYDSSKMYYADTVKGRVTMTRDTSTNTLYMELSSLRSEDTAVYYCASYWWDLDFDHWGQGTMVTVSS

SEQ ID NO: 613 - protein, 9 aa, Artificial Sequence
  Description of Artificial Sequence: Synthetic peptide
SSSDLDFDH

SEQ ID NO: 614 - protein, 9 aa, Artificial Sequence
  Description of Artificial Sequence: Synthetic peptide
SSWDLDFDH

SEQ ID NO: 615 - protein, 9 aa, Artificial Sequence
  Description of Artificial Sequence: Synthetic peptide
STTDLDFDH

SEQ ID NO: 616 - protein, 9 aa, Artificial Sequence
  Description of Artificial Sequence: Synthetic peptide
STWDLDFDH

SEQ ID NO: 617 - protein, 9 aa, Artificial Sequence
  Description of Artificial Sequence: Synthetic peptide
SWSDLDFDH

SEQ ID NO: 618 - protein, 9 aa, Artificial Sequence
  Description of Artificial Sequence: Synthetic peptide
SWWDLDFDH

SEQ ID NO: 619 - protein, 9 aa, Artificial Sequence
  Description of Artificial Sequence: Synthetic peptide
SYYDLDFDH

SEQ ID NO: 620 - protein, 9 aa, Artificial Sequence
  Description of Artificial Sequence: Synthetic peptide
YSSDLDFDH

SEQ ID NO: 621 - protein, 9 aa, Artificial Sequence
  Description of Artificial Sequence: Synthetic peptide
YSWDLDFDH

SEQ ID NO: 622 - protein, 9 aa, Artificial Sequence
  Description of Artificial Sequence: Synthetic peptide
YTTDLDFDH

SEQ ID NO: 623 - protein, 9 aa, Artificial Sequence
  Description of Artificial Sequence: Synthetic peptide
YTWDLDFDH

SEQ ID NO: 624 - protein, 9 aa, Artificial Sequence
  Description of Artificial Sequence: Synthetic peptide
YWSDLDFDH

SEQ ID NO: 625 - protein, 9 aa, Artificial Sequence
  Description of Artificial Sequence: Synthetic peptide
YWSDLDFDH

SEQ ID NO: 626 - protein, 9 aa, Artificial Sequence
  Description of Artificial Sequence: Synthetic peptide
YWWDLDFDH

SEQ ID NO: 627 - protein, 9 aa, Artificial Sequence
  Description of Artificial Sequence: Synthetic peptide
YYYDLDFDH

SEQ ID NO: 628 - protein, 10 aa, Artificial Sequence
  Description of Artificial Sequence: Synthetic peptide
  MOD_RES (3)..(3): Thr or Ala
  MOD_RES (5)..(5): Ser or Arg
  MOD_RES (7)..(7): Asn, Tyr, or Gln
  MOD_RES (10)..(10): His or Ser
GFXFXKXGMX

SEQ ID NO: 629 - protein, 8 aa, Artificial Sequence
  Description of Artificial Sequence: Synthetic peptide
  MOD_RES (3)..(3): Thr or Ala
  MOD_RES (5)..(5): Ser or Arg
  MOD_RES (7)..(7): Asn, Tyr, or Gln
GFXFXKXG

SEQ ID NO: 630 - protein, 5 aa, Artificial Sequence
  Description of Artificial Sequence: Synthetic peptide
  MOD_RES (2)..(2): Asn, Tyr, or Gln
  MOD_RES (5)..(5): His or Ser
KXGMX

SEQ ID NO: 631 - protein, 7 aa, Artificial Sequence
  Description of Artificial Sequence: Synthetic peptide
  MOD_RES (3)..(3): Thr or Ala
  MOD_RES (5)..(5): Ser or Arg
  MOD_RES (7)..(7): Asn, Tyr, or Gln
GFXFXKX

SEQ ID NO: 632 - protein, 17 aa, Artificial Sequence
  Description of Artificial Sequence: Synthetic peptide
  MOD_RES (1)..(1): Met or Leu
  MOD_RES (8)..(8): Lys or Arg
XIYYDSSXMYYADTVKG

SEQ ID NO: 633 - protein, 6 aa, Artificial Sequence
  Description of Artificial Sequence: Synthetic peptide
  MOD_RES (6)..(6): Lys or Arg
YYDSSX

SEQ ID NO: 634 - protein, 8 aa, Artificial Sequence
  Description of Artificial Sequence: Synthetic peptide
  MOD_RES (7)..(7): Lys or Arg
IYYDSSXM

SEQ ID NO: 635 - protein, 9 aa, Artificial Sequence
  Description of Artificial Sequence: Synthetic peptide
  MOD_RES (1)..(1): Phe, Tyr, or Ser
  MOD_RES (2)..(2): Trp, Tyr, Ser, or Thr
  MOD_RES (3)..(3): Trp, Tyr, Ser, or Thr
  MOD_RES (9)..(9): His or Tyr
XXXDLDFDX

SEQ ID NO: 636 - protein, 11 aa, Artificial Sequence
  Description of Artificial Sequence: Synthetic peptide
  MOD_RES (2)..(2): Ser or Lys
  MOD_RES (3)..(3): Phe, Tyr, or Ser
  MOD_RES (4)..(4): Trp, Tyr, Ser, or Thr
  MOD_RES (5)..(5): Trp, Tyr, Ser, or Thr
  MOD_RES (11)..(11): His or Tyr
AXXXXDLDFDX

SEQ ID NO: 637 - protein, 8 aa, Artificial Sequence
  Description of Artificial Sequence: Synthetic peptide
AALNSEYD

SEQ ID NO: 638 - protein, 6 aa, Artificial Sequence
  Description of Artificial Sequence: Synthetic peptide
LNSEYD

SEQ ID NO: 639 - protein, 16 aa, Artificial Sequence
  Description of Artificial Sequence: Synthetic peptide
  MOD_RES (2)..(2): Ser or Gly
  MOD_RES (6)..(6): Ile or Leu
  MOD_RES (7)..(7): Val or Gly
  MOD_RES (8)..(8): Arg or Asn
  MOD_RES (10)..(10): Asp, Glu, or Leu
  MOD_RES (11)..(11): Gly, Asn, or Glu
RXSQSXXXSXXTTYFN

SEQ ID NO: 640 - protein, 10 aa, Artificial Sequence
  Description of Artificial Sequence: Synthetic peptide
  MOD_RES (3)..(3): Ile or Leu
  MOD_RES (4)..(4): Val or Gly
  MOD_RES (5)..(5): Arg or Asn
  MOD_RES (7)..(7): Asp, Glu, or Leu
QSXXXSXTTY

SEQ ID NO: 641 - protein, 12 aa, Artificial Sequence
  Description of Artificial Sequence: Synthetic peptide
  MOD_RES (4)..(4): Ile or Leu
  MOD_RES (5)..(5): Val or Gly
  MOD_RES (6)..(6): Arg or Asn
  MOD_RES (8)..(8): Asp, Glu, or Leu
  MOD_RES (9)..(9): Gly, Asn, or Glu
SQSXXXSXXTTY

SEQ ID NO: 642 - protein, 11 aa, Artificial Sequence
  Description of Artificial Sequence: Synthetic peptide
  MOD_RES (2)..(2): Ser or Gly
  MOD_RES (6)..(6): Ile or Leu
  MOD_RES (7)..(7): Val or Gly
  MOD_RES (8)..(8): Arg or Asn
  MOD_RES (10)..(10): Asp, Glu, or Leu
  MOD_RES (11)..(11): Gly, Asn, or Glu
RXSQSXXXSXX

SEQ ID NO: 643 - protein, 7 aa, Artificial Sequence
  Description of Artificial Sequence: Synthetic peptide
  MOD_RES (4)..(4): Ile or Leu
  MOD_RES (5)..(5): Val or Gly
  MOD_RES (6)..(6): Arg or Asn
SQSXXXS

SEQ ID NO: 644 - protein, 6 aa, Artificial Sequence
  Description of Artificial Sequence: Synthetic peptide
  MOD_RES (3)..(3): Ile or Leu
  MOD_RES (4)..(4): Val or Gly
  MOD_RES (5)..(5): Arg or Asn
QSXXXS

SEQ ID NO: 645 - protein, 7 aa, Artificial Sequence
  Description of Artificial Sequence: Synthetic peptide
  MOD_RES (1)..(1): Arg or Ser
  MOD_RES (2)..(2): Val or Thr
  MOD_RES (4)..(4): Asn or Thr
  MOD_RES (5)..(5): Arg or Leu
  MOD_RES (6)..(6): Phe or Glu
  MOD_RES (7)..(7): Ser or Tyr
XXSXXXX

SEQ ID NO: 646 - protein, 3 aa, Artificial Sequence
  Description of Artificial Sequence: Synthetic peptide
  MOD_RES (1)..(1): Arg or Ser
  MOD_RES (2)..(2): Val or Thr
XXS

SEQ ID NO: 647 - protein, 9 aa, Artificial Sequence
  Description of Artificial Sequence: Synthetic peptide
  MOD_RES (3)..(3): Ser or Tyr
  MOD_RES (4)..(4): Ser or Ala
  MOD_RES (5)..(5): His or Thr
  MOD_RES (6)..(6): Phe or Tyr
  MOD_RES (8)..(8): Trp or Tyr
LQXXXXPXT

SEQ ID NO: 648 - protein, 6 aa, Artificial Sequence
  Description of Artificial Sequence: Synthetic peptide
  MOD_RES (1)..(1): Ser or Tyr
  MOD_RES (2)..(2): Ser or Ala
  MOD_RES (3)..(3): His or Thr
  MOD_RES (4)..(4): Phe or Tyr
  MOD_RES (6)..(6): Trp or Tyr
XXXXPX

SEQ ID NO: 649 - protein, 5 aa, Artificial Sequence
  Description of Artificial Sequence: Synthetic peptide
  MOD_RES (3)..(3): Ser or Tyr
  MOD_RES (4)..(4): Ser or Ala
  MOD_RES (5)..(5): His or Thr
LQXXX

SEQ ID NO: 650 - protein, 8 aa, Artificial Sequence
  Description of Artificial Sequence: Synthetic peptide
  MOD_RES (3)..(3): Ser or Tyr
  MOD_RES (4)..(4): Ser or Ala
  MOD_RES (5)..(5): His or Thr
  MOD_RES (6)..(6): Phe or Tyr
  MOD_RES (8)..(8): Trp or Tyr
LQXXXXPX

SEQ ID NO: 651 - protein, 10 aa, Artificial Sequence
  Description of Artificial Sequence: Synthetic peptide
  MOD_RES (9)..(9): Val or Ile
GFSLTTYNXH

SEQ ID NO: 652 - protein, 8 aa, Artificial Sequence
  Description of Artificial Sequence: Synthetic peptide
GFSLTTYN

SEQ ID NO: 653 - protein, 5 aa, Artificial Sequence
  Description of Artificial Sequence: Synthetic peptide
  MOD_RES (4)..(4): Val or Ile
TYNXH

SEQ ID NO: 654 - protein, 7 aa, Artificial Sequence
  Description of Artificial Sequence: Synthetic peptide
GFSLTTY

SEQ ID NO: 655 - protein, 16 aa, Artificial Sequence
  Description of Artificial Sequence: Synthetic peptide
  MOD_RES (10)..(10): Phe or Tyr
  MOD_RES (11)..(11): Asn or Ser
  MOD_RES (12)..(12): Ala or Ser
  MOD_RES (15)..(15): Thr or Lys
RMRYSGDTSXXXALXS

SEQ ID NO: 656 - protein, 5 aa, Artificial Sequence
  Description of Artificial Sequence: Synthetic peptide
RYSGD

SEQ ID NO: 657 - protein, 7 aa, Artificial Sequence
  Description of Artificial Sequence: Synthetic peptide
MRYSGDT

SEQ ID NO: 658 - protein, 15 aa, Artificial Sequence
  Description of Artificial Sequence: Synthetic peptide
  MOD_RES (7)..(7): Asn or Gly
  MOD_RES (9)..(9): Ser or Ala
DPMYIPXYXYGVMNA

SEQ ID NO: 659 - protein, 17 aa, Artificial Sequence
  Description of Artificial Sequence: Synthetic peptide
  MOD_RES (1)..(1): Thr or Ala
  MOD_RES (2)..(2): Ser or Arg
  MOD_RES (9)..(9): Asn or Gly
  MOD_RES (11)..(11): Ser or Ala
XXDPMYIPXYXYGVMNA

SEQ ID NO: 660 - protein, 11 aa, Artificial Sequence
  Description of Artificial Sequence: Synthetic peptide
  MOD_RES (2)..(2): Ala, Thr, or Ser
  MOD_RES (7)..(7): Asn or Asp
  MOD_RES (8)..(8): Asn or Lys
KXSQNIXXYLN

SEQ ID NO: 661 - protein, 7 aa, Artificial Sequence
  Description of Artificial Sequence: Synthetic peptide
  MOD_RES (5)..(5): Asn or Asp
  MOD_RES (6)..(6): Asn or Lys
SQNIXXY

SEQ ID NO: 662 - protein, 6 aa, Artificial Sequence
  Description of Artificial Sequence: Synthetic peptide
  MOD_RES (4)..(4): Asn or Asp
  MOD_RES (5)..(5): Asn or Lys
QNIXXY

SEQ ID NO: 663 - protein, 10 aa, Artificial Sequence
  Description of Artificial Sequence: Synthetic peptide
  MOD_RES (3)..(3): Asp or Asn
  MOD_RES (4)..(4): His or Asn
  MOD_RES (6)..(6): Gln or Glu
NTXXLXAGVP

SEQ ID NO: 664 - protein, 7 aa, Artificial Sequence
  Description of Artificial Sequence: Synthetic peptide
  MOD_RES (3)..(3): Asp or Asn
  MOD_RES (4)..(4): His or Asn
  MOD_RES (6)..(6): Gln or Glu
NTXXLXA

SEQ ID NO: 665 - protein, 3 aa, Artificial Sequence
  Description of Artificial Sequence: Synthetic peptide
  MOD_RES (3)..(3): Asp or Asn
NTX

SEQ ID NO: 666 - protein, 8 aa, Artificial Sequence
  Description of Artificial Sequence: Synthetic peptide
  MOD_RES (6)..(6): Arg, Ser, or Gly
LQHRSXYT

SEQ ID NO: 667 - protein, 5 aa, Artificial Sequence
  Description of Artificial Sequence: Synthetic peptide
  MOD_RES (4)..(4): Arg, Ser, or Gly
HRSXY

SEQ ID NO: 668 - protein, 10 aa, Artificial Sequence
  Description of Artificial Sequence: Synthetic peptide
GYTFTSYYIY

SEQ ID NO: 669 - protein, 8 aa, Artificial Sequence
  Description of Artificial Sequence: Synthetic peptide
GYTFTSYY

SEQ ID NO: 670 - protein, 5 aa, Artificial Sequence
  Description of Artificial Sequence: Synthetic peptide
SYYIY

SEQ ID NO: 671 - protein, 7 aa, Artificial Sequence
  Description of Artificial Sequence: Synthetic peptide
GYTFTSY

SEQ ID NO: 672 - protein, 17 aa, Artificial Sequence
  Description of Artificial Sequence: Synthetic peptide
  MOD_RES (5)..(5): Gly or Ala
  MOD_RES (6)..(6): His or Asn
  MOD_RES (7)..(7): Asp or Gly
  MOD_RES (8)..(8): Ala or Gly
  MOD_RES (14)..(14): Asn or Lys
YIYPXXXXIYYSEXFKG

SEQ ID NO: 673 - protein, 6 aa, Artificial Sequence
  Description of Artificial Sequence: Synthetic peptide
  MOD_RES (3)..(3): Gly or Ala
  MOD_RES (4)..(4): His or Asn
  MOD_RES (5)..(5): Asp or Gly
  MOD_RES (6)..(6): Ala or Gly
YPXXXX

SEQ ID NO: 674 - protein, 8 aa, Artificial Sequence
  Description of Artificial Sequence: Synthetic peptide
  MOD_RES (4)..(4): Gly or Ala
  MOD_RES (5)..(5): His or Asn
  MOD_RES (6)..(6): Asp or Gly
  MOD_RES (7)..(7): Ala or Gly
IYPXXXXI

SEQ ID NO: 675 - protein, 12 aa, Artificial Sequence
  Description of Artificial Sequence: Synthetic peptide
  MOD_RES (1)..(1): Val or Ala
  MOD_RES (4)..(4): Asn or Val
  MOD_RES (11)..(11): Ala or Val
  MOD_RES (12)..(12): Tyr or Phe
XRPXTMMAPLXX

SEQ ID NO: 676 - protein, 10 aa, Artificial Sequence
  Description of Artificial Sequence: Synthetic peptide
  MOD_RES (2)..(2): Asn or Val
  MOD_RES (9)..(9): Ala or Val
  MOD_RES (10)..(10): Tyr or Phe
PXTMMAPLXX

SEQ ID NO: 677 - protein, 16 aa, Artificial Sequence
  Description of Artificial Sequence: Synthetic peptide
  MOD_RES (7)..(7): Ile or Val
  MOD_RES (10)..(10): Ile or His
RSSQSLXYSXGNTYLH

SEQ ID NO: 678 - protein, 12 aa, Artificial Sequence
  Description of Artificial Sequence: Synthetic peptide
  MOD_RES (5)..(5): Ile or Val
  MOD_RES (8)..(8): Ile or His
SQSLXYSXGNTY

SEQ ID NO: 679 - protein, 11 aa, Artificial Sequence
  Description of Artificial Sequence: Synthetic peptide
  MOD_RES (4)..(4): Ile or Val
  MOD_RES (7)..(7): Ile or His
QSLXYSXGNTY

SEQ ID NO: 680 - protein, 7 aa, Artificial Sequence
  Description of Artificial Sequence: Synthetic peptide
RVSNRFS

SEQ ID NO: 681 - protein, 3 aa, Artificial Sequence
  Description of Artificial Sequence: Synthetic peptide
RVS

SEQ ID NO: 682 - protein, 9 aa, Artificial Sequence
  Description of Artificial Sequence: Synthetic peptide
FQSTHLPYT

SEQ ID NO: 683 - protein, 6 aa, Artificial Sequence
  Description of Artificial Sequence: Synthetic peptide
STHLPY

SEQ ID NO: 684 - protein, 7 aa, Artificial Sequence
  Description of Artificial Sequence: Synthetic peptide
DASNRAT

SEQ ID NO: 685 - protein, 3 aa, Artificial Sequence
  Description of Artificial Sequence: Synthetic peptide
GTN

SEQ ID NO: 686 - protein, 3 aa, Artificial Sequence
  Description of Artificial Sequence: Synthetic peptide
DAS

SEQ ID NO: 687 - protein, 115 aa, Artificial Sequence
  Description of Artificial Sequence: Synthetic polypeptide
EVQLVESGGGLVQPGGSLRLSCAVSGFALSNHGMSWVRRAPGKGLEWVSGIVYSGSTYYAASVKGRFTISRDNSRNTLYLQMNSLRPEDTAIYYCSAHGGESDVWGQGTTVTVSS

SEQ ID NO: 688 - protein, 107 aa, Artificial Sequence
  Description of Artificial Sequence: Synthetic polypeptide
DIQLTQSPSSLSASVGDRVTITCRASQSISSYLNWYQQKPGKAPKLLIYAASSLQSGVPSRFSGSGSGTDFTLTISSLQPEDFATYYCQQSYSTPYTFGQGTKVEIK

SEQ ID NO: 689 - protein, 239 aa, Artificial Sequence
  Description of Artificial Sequence: Synthetic polypeptide
EVQLVESGGGLVQPGGSLRLSCAVSGFALSNHGMSWVRRAPGKGLEWVSGIVYSGSTYYAASVKGRFTISRDNSRNTLYLQMNSLRPEDTAIYYCSAHGGESDVWGQGTTVTVSSASGGGGSGGRASGGGGSDIQLTQSPSSLSASVGDRVTITCRASQSISSYLNWYQQKPGKAPKLLIYAASSLQSGVPSRFSGSGSGTDFTLTISSLQPEDFATYYCQQSYSTPYTFGQGTKVEIK

SEQ ID NO: 690 - protein, 120 aa, Artificial Sequence
  Description of Artificial Sequence: Synthetic polypeptide
QVQLVESGGGLVQPGRSLRLSCAASGFTFSNYAMSWVRQAPGKGLGWVSGISRSGENTYYADSVKGRFTISRDNSKNTLYLQMNSLRDEDTAVYYCARSPAHYYGGMDVWGQGTTVTVSS

SEQ ID NO: 691 - protein, 109 aa, Artificial Sequence
  Description of Artificial Sequence: Synthetic polypeptide
DIVLTQSPGTLSLSPGERATLSCRASQSISSSFLAWYQQKPGQAPRLLIYGASRRATGIPDRFSGSGSGTDFTLTISRLEPEDSAVYYCQQYHSSPSWTFGQGTKLEIK

SEQ ID NO: 692 - protein, 246 aa, Artificial Sequence
  Description of Artificial Sequence: Synthetic polypeptide
QVQLVESGGGLVQPGRSLRLSCAASGFTFSNYAMSWVRQAPGKGLGWVSGISRSGENTYYADSVKGRFTISRDNSKNTLYLQMNSLRDEDTAVYYCARSPAHYYGGMDVWGQGTTVTVSSASGGGGSGGRASGGGGSDIVLTQSPGTLSLSPGERATLSCRASQSISSSFLAWYQQKPGQAPRLLIYGASRRATGIPDRFSGSGSGTDFTLTISRLEPEDSAVYYCQQYHSSPSWTFGQGTKLEIK

SEQ ID NO: 693 - protein, 115 aa, Artificial Sequence
  Description of Artificial Sequence: Synthetic polypeptide
QVQLVESGGGLVQPGRSLRLSCAASGFTFDDYAMHWVRQAPGKGLEWVSGISWNSGSIGYADSVKGRFTISRDNAKNSLYLQMNSLRAEDTALYYCSVHSFLAYWGQGTLVTVSS

SEQ ID NO: 694 - protein, 112 aa, Artificial Sequence
  Description of Artificial Sequence: Synthetic polypeptide
DIVMTQTPLSLPVTPGEPASISCRSSQSLLHSNGYNYLDWYLQKPGQSPQLLIYLGSNRASGVPDRFSGSGSGTDFTLKISRVEAEDVGVYYCMQALQTPYTFGQGTKVEIK

SEQ ID NO: 695 - protein, 244 aa, Artificial Sequence
  Description of Artificial Sequence: Synthetic polypeptide
QVQLVESGGGLVQPGRSLRLSCAASGFTFDDYAMHWVRQAPGKGLEWVSGISWNSGSIGYADSVKGRFTISRDNAKNSLYLQMNSLRAEDTALYYCSVHSFLAYWGQGTLVTVSSASGGGGSGGRASGGGGSDIVMTQTPLSLPVTPGEPASISCRSSQSLLHSNGYNYLDWYLQKPGQSPQLLIYLGSNRASGVPDRFSGSGSGTDFTLKISRVEAEDVGVYYCMQALQTPYTFGQGTKVEIK

SEQ ID NO: 696 - protein, 115 aa, Artificial Sequence
  Description of Artificial Sequence: Synthetic polypeptide
EVQLLESGGGLVQPGGSLRLSCAVSGFALSNHGMSWVRRAPGKGLEWVSGIVYSGSTYYAASVKGRFTISRDNSRNTLYLQMNSLRPEDTAIYYCSAHGGESDVWGQGTTVTVSS

SEQ ID NO: 697 - protein, 111 aa, Artificial Sequence
  Description of Artificial Sequence: Synthetic polypeptide
DIVMTQTPLSLSVTPGQPASISCKSSQSLLRNDGKTPLYWYLQKAGQPPQLLIYEVSNRFSGVPDRFSGSGSGTDFTLKISRVEAEDVGAYYCMQNIQFPSFGGGTKLEIK

SEQ ID NO: 698 - protein, 243 aa, Artificial Sequence
  Description of Artificial Sequence: Synthetic polypeptide
EVQLLESGGGLVQPGGSLRLSCAVSGFALSNHGMSWVRRAPGKGLEWVSGIVYSGSTYYAASVKGRFTISRDNSRNTLYLQMNSLRPEDTAIYYCSAHGGESDVWGQGTTVTVSSASGGGGSGGRASGGGGSDIVMTQTPLSLSVTPGQPASISCKSSQSLLRNDGKTPLYWYLQKAGQPPQLLIYEVSNRFSGVPDRFSGSGSGTDFTLKISRVEAEDVGAYYCMQNIQFPSFGGGTKLEIK

SEQ ID NO: 699 - protein, 120 aa, Artificial Sequence
  Description of Artificial Sequence: Synthetic polypeptide
QVQLVQSGAEVRKTGASVKVSCKASGYIFDNFGINWVRQAPGQGLEWMGWINPKNNNTNYAQKFQGRVTITADESTNTAYMEVSSLRSEDTAVYYCARGPYYYQSYMDVWGQGTMVTVSS

SEQ ID NO: 700 - protein, 112 aa, Artificial Sequence
  Description of Artificial Sequence: Synthetic polypeptide
DIVMTQTPLSLPVTPGEPASISCRSSQSLLHSNGYNYLNWYLQKPGQSPQLLIYLGSKRASGVPDRFSGSGSGTDFTLHITRVGAEDVGVYYCMQALQTPYTFGQGTKLEIK

SEQ ID NO: 701 - protein, 249 aa, Artificial Sequence
  Description of Artificial Sequence: Synthetic polypeptide
QVQLVQSGAEVRKTGASVKVSCKASGYIFDNFGINWVRQAPGQGLEWMGWINPKNNNTNYAQKFQGRVTITADESTNTAYMEVSSLRSEDTAVYYCARGPYYYQSYMDVWGQGTMVTVSSASGGGGSGGRASGGGGSDIVMTQTPLSLPVTPGEPASISCRSSQSLLHSNGYNYLNWYLQKPGQSPQLLIYLGSKRASGVPDRFSGSGSGTDFTLHITRVGAEDVGVYYCMQALQTPYTFGQGTKLEIK

SEQ ID NO: 702 - protein, 123 aa, Artificial Sequence
  Description of Artificial Sequence: Synthetic polypeptide
QVQLQESGGGLVQPGGSLRLSCAASGFTFSSDAMTWVRQAPGKGLEWVSVISGSGGTTYYADSVKGRFTISRDNSKNTLYLQMNSLRAEDTAVYYCAKLDSSGYYYARGPRYWGQGTLVTVSS

SEQ ID NO: 703 - protein, 106 aa, Artificial Sequence
  Description of Artificial Sequence: Synthetic polypeptide
DIQLTQSPSSLSASVGDRVTITCRASQSISSYLNWYQQKPGKAPKLLIYGASTLASGVPARFSGSGSGTHFTLTINSLQSEDSATYYCQQSYKRASFGQGTKVEIK

SEQ ID NO: 704 - protein, 246 aa, Artificial Sequence
  Description of Artificial Sequence: Synthetic polypeptide
QVQLQESGGGLVQPGGSLRLSCAASGFTFSSDAMTWVRQAPGKGLEWVSVISGSGGTTYYADSVKGRFTISRDNSKNTLYLQMNSLRAEDTAVYYCAKLDSSGYYYARGPRYWGQGTLVTVSSASGGGGSGGRASGGGGSDIQLTQSPSSLSASVGDRVTITCRASQSISSYLNWYQQKPGKAPKLLIYGASTLASGVPARFSGSGSGTHFTLTINSLQSEDSATYYCQQSYKRASFGQGTKVEIK

SEQ ID NO: 705 - protein, 118 aa, Artificial Sequence
  Description of Artificial Sequence: Synthetic polypeptide
QVQLVQSGAEVKKPGASVKVSCKASGYTFSNYGITWVRQAPGQGLEWMGWISAYNGNTNYAQKFQGRVTMTRNTSISTAYMELSSLRSEDTAVYYCARGPYYYYMDVWGKGTMVTVSS

SEQ ID NO: 706 - protein, 112 aa, Artificial Sequence
  Description of Artificial Sequence: Synthetic polypeptide
EIVMTQSPLSLPVTPGEPASISCRSSQSLLYSNGYNYVDWYLQKPGQSPQLLIYLGSNRASGVPDRFSGSGSGTDFKLQISRVEAEDVGIYYCMQGRQFPYSFGQGTKVEIK

SEQ ID NO: 707 - protein, 247 aa, Artificial Sequence
  Description of Artificial Sequence: Synthetic polypeptide
QVQLVQSGAEVKKPGASVKVSCKASGYTFSNYGITWVRQAPGQGLEWMGWISAYNGNTNYAQKFQGRVTMTRNTSISTAYMELSSLRSEDTAVYYCARGPYYYYMDVWGKGTMVTVSSASGGGGSGGRASGGGGSEIVMTQSPLSLPVTPGEPASISCRSSQSLLYSNGYNYVDWYLQKPGQSPQLLIYLGSNRASGVPDRFSGSGSGTDFKLQISRVEAEDVGIYYCMQGRQFPYSFGQGTKVEIK

SEQ ID NO: 708 - protein, 115 aa, Artificial Sequence
  Description of Artificial Sequence: Synthetic polypeptide
EVQLLETGGGLVQPGGSLRLSCAVSGFALSNHGMSWVRRAPGKGLEWVSGIVYSGSTYYAASVKGRFTISRDNSRNTLYLQMNSLRPEDTAIYYCSAHGGESDVWGQGTTVTVSS

SEQ ID NO: 709 - protein, 106 aa, Artificial Sequence
  Description of Artificial Sequence: Synthetic polypeptide
EIVLTQSPATLSVSPGESATLSCRASQSVSSNLAWYQQKPGQAPRLLIYGASTRASGIPDRFSGSGSGTDFTLTISSLQAEDVAVYYCQQYGSSLTFGGGTKVEIK

SEQ ID NO: 710 - protein, 238 aa, Artificial Sequence
  Description of Artificial Sequence: Synthetic polypeptide
EVQLLETGGGLVQPGGSLRLSCAVSGFALSNHGMSWVRRAPGKGLEWVSGIVYSGSTYYAASVKGRFTISRDNSRNTLYLQMNSLRPEDTAIYYCSAHGGESDVWGQGTTVTVSSASGGGGSGGRASGGGGSEIVLTQSPATLSVSPGESATLSCRASQSVSSNLAWYQQKPGQAPRLLIYGASTRASGIPDRFSGSGSGTDFTLTISSLQAEDVAVYYCQQYGSSLTFGGGTKVEIK

SEQ ID NO: 711 - protein, 115 aa, Artificial Sequence
  Description of Artificial Sequence: Synthetic polypeptide
EVQLVETGGGLVQPGGSLRLSCAVSGFALSNHGMSWVRRAPGKGLEWVSGIVYSGSTYYAASVKGRFTISRDNSRNTLYLQMNSLRPEDTAIYYCSAHGGESDVWGQGTTVTVSS

SEQ ID NO: 712 - protein, 107 aa, Artificial Sequence
  Description of Artificial Sequence: Synthetic polypeptide
EIVMTQSPATLSVSPGERATLSCRASQSVSSKLAWYQQKPGQAPRLLMYGASIRATGIPDRFSGSGSGTEFTLTISSLEPEDFAVYYCQQYGSSSWTFGQGTKVEIK

SEQ ID NO: 713 - protein, 239 aa, Artificial Sequence
  Description of Artificial Sequence: Synthetic polypeptide
EVQLVETGGGLVQPGGSLRLSCAVSGFALSNHGMSWVRRAPGKGLEWVSGIVYSGSTYYAASVKGRFTISRDNSRNTLYLQMNSLRPEDTAIYYCSAHGGESDVWGQGTTVTVSSASGGGGSGGRASGGGGSEIVMTQSPATLSVSPGERATLSCRASQSVSSKLAWYQQKPGQAPRLLMYGASIRATGIPDRFSGSGSGTEFTLTISSLEPEDFAVYYCQQYGSSSWTFGQGTKVEIK

SEQ ID NO: 714 - protein, 115 aa, Artificial Sequence
  Description of Artificial Sequence: Synthetic polypeptide
EVQLVETGGGVVQPGGSLRLSCAVSGFALSNHGMSWVRRAPGKGLEWVSGIVYSGSTYYAASVKGRFTISRDNSRNTLYLQMNSLRPEDTAIYYCSAHGGESDVWGQGTTVTVSS

SEQ ID NO: 715 - protein, 109 aa, Artificial Sequence
  Description of Artificial Sequence: Synthetic polypeptide
EIVLTQSPGTLSLSPGERATLSCRASQSVGSTNLAWYQQKPGQAPRLLIYDASNRATGIPDRFSGGGSGTDFTLTISRLEPEDFAVYYCQQYGSSPPWTFGQGTKVEIK

SEQ ID NO: 716 - protein, 241 aa, Artificial Sequence
  Description of Artificial Sequence: Synthetic polypeptide
EVQLVETGGGVVQPGGSLRLSCAVSGFALSNHGMSWVRRAPGKGLEWVSGIVYSGSTYYAASVKGRFTISRDNSRNTLYLQMNSLRPEDTAIYYCSAHGGESDVWGQGTTVTVSSASGGGGSGGRASGGGGSEIVLTQSPGTLSLSPGERATLSCRASQSVGSTNLAWYQQKPGQAPRLLIYDASNRATGIPDRFSGGGSGTDFTLTISRLEPEDFAVYYCQQYGSSPPWTFGQGTKVEIK

SEQ ID NO: 717 - protein, 117 aa, Artificial Sequence
  Description of Artificial Sequence: Synthetic polypeptide
QVQLVESGGGLVKPGGSLRLSCAASGFTFSDYYMSWIRQAPGKGLEWVSYISSSGSTIYYADSVKGRFTISRDNAKNSLYLQMNSLRAEDTAVYYCARESGDGMDVWGQGTTVTVSS

SEQ ID NO: 718 - protein, 105 aa, Artificial Sequence
  Description of Artificial Sequence: Synthetic polypeptide
DIQMTQSPSSLSASVGDRVTITCRASQSISSYLNWYQQKPGKAPKLLIYAASSLQSGVPSRFSGSGSGTDFTLTISSLQPEDFATYYCQQSYTLAFGQGTKVDIK

SEQ ID NO: 719 - protein, 239 aa, Artificial Sequence
  Description of Artificial Sequence: Synthetic polypeptide
QVQLVESGGGLVKPGGSLRLSCAASGFTFSDYYMSWIRQAPGKGLEWVSYISSSGSTIYYADSVKGRFTISRDNAKNSLYLQMNSLRAEDTAVYYCARESGDGMDVWGQGTTVTVSSASGGGGSGGRASGGGGSDIQMTQSPSSLSASVGDRVTITCRASQSISSYLNWYQQKPGKAPKLLIYAASSLQSGVPSRFSGSGSGTDFTLTISSLQPEDFATYYCQQSYTLAFGQGTKVDIK

SEQ ID NO: 720 - protein, 117 aa, Artificial Sequence
  Description of Artificial Sequence: Synthetic polypeptide
QVQLVQSGGGLVKPGGSLRLSCAASGFTFSDYYMSWIRQAPGKGLEWVSYISSSGNTIYYADSVKGRFTISRDNAKNSLYLQMNSLRAEDTAVYYCARSTMVREDYWGQGTLVTVSS

SEQ ID NO: 721 - protein, 112 aa, Artificial Sequence
  Description of Artificial Sequence: Synthetic polypeptide
DIVLTQSPLSLPVTLGQPASISCKSSESLVHNSGKTYLNWFHQRPGQSPRRLIYEVSNRDSGVPDRFTGSGSGTDFTLKISRVEAEDVGVYYCMQGTHWPGTFGQGTKLEIK

SEQ ID NO: 722 - protein, 246 aa, Artificial Sequence
  Description of Artificial Sequence: Synthetic polypeptide
QVQLVQSGGGLVKPGGSLRLSCAASGFTFSDYYMSWIRQAPGKGLEWVSYISSSGNTIYYADSVKGRFTISRDNAKNSLYLQMNSLRAEDTAVYYCARSTMVREDYWGQGTLVTVSSASGGGGSGGRASGGGGSDIVLTQSPLSLPVTLGQPASISCKSSESLVHNSGKTYLNWFHQRPGQSPRRLIYEVSNRDSGVPDRFTGSGSGTDFTLKISRVEAEDVGVYYCMQGTHWPGTFGQGTKLEIK

SEQ ID NO: 723 - protein, 115 aa, Artificial Sequence
  Description of Artificial Sequence: Synthetic polypeptide
QVQLVESGGGLVQPGGSLRLSCAVSGFALSNHGMSWVRRAPGKGLEWVSGIVYSGSTYYAASVKGRFTISRDNSRNTLYLQMNSLRPEDTAIYYCSAHGGESDVWGQGTTVTVSS

SEQ ID NO: 724 - protein, 107 aa, Artificial Sequence
  Description of Artificial Sequence: Synthetic polypeptide
DIRLTQSPSPLSASVGDRVTITCQASEDINKFLNWYHQTPGKAPKLLIYDASTLQTGVPSRFSGSGSGTDFTLTINSLQPEDIGTYYCQQYESLPLTFGGGTKVEIK

SEQ ID NO: 725 - protein, 239 aa, Artificial Sequence
  Description of Artificial Sequence: Synthetic polypeptide
QVQLVESGGGLVQPGGSLRLSCAVSGFALSNHGMSWVRRAPGKGLEWVSGIVYSGSTYYAASVKGRFTISRDNSRNTLYLQMNSLRPEDTAIYYCSAHGGESDVWGQGTTVTVSSASGGGGSGGRASGGGGSDIRLTQSPSPLSASVGDRVTITCQASEDINKFLNWYHQTPGKAPKLLIYDASTLQTGVPSRFSGSGSGTDFTLTINSLQPEDIGTYYCQQYESLPLTFGGGTKVEIK

SEQ ID NO: 726 - protein, 108 aa, Artificial Sequence
  Description of Artificial Sequence: Synthetic polypeptide
ETTLTQSPATLSVSPGERATLSCRASQSVGSNLAWYQQKPGQGPRLLIYGASTRATGIPARFSGSGSGTEFTLTISSLQPEDFAVYYCQQYNDWLPVTFGQGTKVEIK

SEQ ID NO: 727 - protein, 240 aa, Artificial Sequence
  Description of Artificial Sequence: Synthetic polypeptide
EVQLVETGGGLVQPGGSLRLSCAVSGFALSNHGMSWVRRAPGKGLEWVSGIVYSGSTYYAASVKGRFTISRDNSRNTLYLQMNSLRPEDTAIYYCSAHGGESDVWGQGTTVTVSSASGGGGSGGRASGGGGSETTLTQSPATLSVSPGERATLSCRASQSVGSNLAWYQQKPGQGPRLLIYGASTRATGIPARFSGSGSGTEFTLTISSLQPEDFAVYYCQQYNDWLPVTFGQGTKVEIK

SEQ ID NO: 728 - protein, 109 aa, Artificial Sequence
  Description of Artificial Sequence: Synthetic polypeptide
EIVLTQSPGTLSLSPGERATLSCRASQSIGSSSLAWYQQKPGQAPRLLMYGASSRASGIPDRFSGSGSGTDFTLTISRLEPEDFAVYYCQQYAGSPPFTFGQGTKVEIK

SEQ ID NO: 729 - protein, 241 aa, Artificial Sequence
  Description of Artificial Sequence: Synthetic polypeptide
EVQLVESGGGLVQPGGSLRLSCAVSGFALSNHGMSWVRRAPGKGLEWVSGIVYSGSTYYAASVKGRFTISRDNSRNTLYLQMNSLRPEDTAIYYCSAHGGESDVWGQGTTVTVSSASGGGGSGGRASGGGGSEIVLTQSPGTLSLSPGERATLSCRASQSIGSSSLAWYQQKPGQAPRLLMYGASSRASGIPDRFSGSGSGTDFTLTISRLEPEDFAVYYCQQYAGSPPFTFGQGTKVEIK

SEQ ID NO: 730 - protein, 121 aa, Artificial Sequence
  Description of Artificial Sequence: Synthetic polypeptide
QVQLQESGPGLVKPSETLSLTCTVSGGSISSSYYYWGWIRQPPGKGLEWIGSIYYSGSAYYNPSLKSRVTISVDTSKNQFSLRLSSVTAADTAVYYCARHWQEWPDAFDIWGQGTMVTVSS

SEQ ID NO: 731 - protein, 107 aa, Artificial Sequence
  Description of Artificial Sequence: Synthetic polypeptide
ETTLTQSPAFMSATPGDKVIISCKASQDIDDAMNWYQQKPGEAPLFIIQSATSPVPGIPPRFSGSGFGTDFSLTINNIESEDAAYYFCLQHDNFPLTFGQGTKLEIK

SEQ ID NO: 732 - protein, 243 aa, Artificial Sequence
  Description of Artificial Sequence: Synthetic polypeptide
QVQLQESGPGLVKPSETLSLTCTVSGGSISSSYYYWGWIRQPPGKGLEWIGSIYYSGSAYYNPSLKSRVTISVDTSKNQFSLRLSSVTAADTAVYYCARHWQEWPDAFDIWGQGTMVTVSSGGGGSGGGGSGGGGSETTLTQSPAFMSATPGDKVIISCKASQDIDDAMNWYQQKPGEAPLFIIQSATSPVPGIPPRFSGSGFGTDFSLTINNIESEDAAYYFCLQHDNFPLTFGQGTKLEIK

SEQ ID NO: 733 - protein, 123 aa, Artificial Sequence
  Description of Artificial Sequence: Synthetic polypeptide
QVNLRESGPALVKPTQTLTLTCTFSGFSLRTSGMCVSWIRQPPGKALEWLARIDWDEDKFYSTSLKTRLTISKDTSDNQVVLRMTNMDPADTATYYCARSGAGGTSATAFDIWGPGTMVTVSS

SEQ ID NO: 734 - protein, 107 aa, Artificial Sequence
  Description of Artificial Sequence: Synthetic polypeptide
DIQMTQSPSSLSASVGDRVTITCRASQDIYNNLAWFQLKPGSAPRSLMYAANKSQSGVPSRFSGSASGTDFTLTISSLQPEDFATYYCQHYYRFPYSFGQGTKLEIK

SEQ ID NO: 735 - protein, 244 aa, Artificial Sequence
  Description of Artificial Sequence: Synthetic polypeptide
VNLRESGPALVKPTQTLTLTCTFSGFSLRTSGMCVSWIRQPPGKALEWLARIDWDEDKFYSTSLKTRLTISKDTSDNQVVLRMTNMDPADTATYYCARSGAGGTSATAFDIWGPGTMVTVSSGGGGSGGGGSGGGGSDIQMTQSPSSLSASVGDRVTITCRASQDIYNNLAWFQLKPGSAPRSLMYAANKSQSGVPSRFSGSASGTDFTLTISSLQPEDFATYYCQHYYRFPYSFGQGTKLEIK

SEQ ID NO: 736 - protein, 119 aa, Artificial Sequence
  Description of Artificial Sequence: Synthetic polypeptide
EVQLVESGGGLVKPGGSLRLSCAASGFTFSSYSMNWVRQAPGKGLEWVSSISSSSSYIYYADSVKGRFTISRDNAKNSLYLQMNSLRAEDTAVYYCAKTIAAVYAFDIWGQGTTVTVSS

SEQ ID NO: 737 - protein, 112 aa, Artificial Sequence
  Description of Artificial Sequence: Synthetic polypeptide
EIVLTQSPLSLPVTPEEPASISCRSSQSLLHSNGYNYLDWYLQKPGQSPQLLIYLGSNRASGVPDRFSGSGSGTDFTLKISRVEAEDVGVYYCMQALQTPYTFGQGTKLEIK

SEQ ID NO: 738 - protein, 246 aa, Artificial Sequence
  Description of Artificial Sequence: Synthetic polypeptide
EVQLVESGGGLVKPGGSLRLSCAASGFTFSSYSMNWVRQAPGKGLEWVSSISSSSSYIYYADSVKGRFTISRDNAKNSLYLQMNSLRAEDTAVYYCAKTIAAVYAFDIWGQGTTVTVSSGGGGSGGGGSGGGGSEIVLTQSPLSLPVTPEEPASISCRSSQSLLHSNGYNYLDWYLQKPGQSPQLLIYLGSNRASGVPDRFSGSGSGTDFTLKISRVEAEDVGVYYCMQALQTPYTFGQGTKLEIK

SEQ ID NO: 739 - protein, 117 aa, Artificial Sequence
  Description of Artificial Sequence: Synthetic polypeptide
EVQLVESGGGLVKPGGSLRLSCAASGFTFSDYYMSWIRQAPGKGLEWVSYISSSGSTIYYADSVKGRFTISRDNAKNSLYLQMNSLRAEDTAVYYCARDLRGAFDIWGQGTMVTVSS

SEQ ID NO: 740 - protein, 108 aa, Artificial Sequence
  Description of Artificial Sequence: Synthetic polypeptide
SYVLTQSPSVSAAPGYTATISCGGNNIGTKSVHWYQQKPGQAPLLVIRDDSVRPSKIPGRFSGSNSGNMATLTISGVQAGDEADFYCQVWDSDSEHVVFGGGTKLTVL

SEQ ID NO: 741 - protein, 240 aa, Artificial Sequence
  Description of Artificial Sequence: Synthetic polypeptide
EVQLVESGGGLVKPGGSLRLSCAASGFTFSDYYMSWIRQAPGKGLEWVSYISSSGSTIYYADSVKGRFTISRDNAKNSLYLQMNSLRAEDTAVYYCARDLRGAFDIWGQGTMVTVSSGGGGSGGGGSGGGGSSYVLTQSPSVSAAPGYTATISCGGNNIGTKSVHWYQQKPGQAPLLVIRDDSVRPSKIPGRFSGSNSGNMATLTISGVQAGDEADFYCQVWDSDSEHVVFGGGTKLTVL

SEQ ID NO: 742 - protein, 120 aa, Artificial Sequence
  Description of Artificial Sequence: Synthetic polypeptide
QVQLVQSGAEVKKPGASVKVSCKPSGYTVTSHYIHWVRRAPGQGLEWMGMINPSGGVTAYSQTLQGRVTMTSDTSSSTVYMELSSLRSEDTAMYYCAREGSGSGWYFDFWGRGTLVTVSS

SEQ ID NO: 743 - protein, 106 aa, Artificial Sequence
  Description of Artificial Sequence: Synthetic polypeptide
SYVLTQPPSVSVSPGQTASITCSGDGLSKKYVSWYQQKAGQSPVVLISRDKERPSGIPDRFSGSNSADTATLTISGTQAMDEADYYCQAWDDTTVVFGGGTKLTVL

SEQ ID NO: 744 - protein, 241 aa, Artificial Sequence
  Description of Artificial Sequence: Synthetic polypeptide
QVQLVQSGAEVKKPGASVKVSCKPSGYTVTSHYIHWVRRAPGQGLEWMGMINPSGGVTAYSQTLQGRVTMTSDTSSSTVYMELSSLRSEDTAMYYCAREGSGSGWYFDFWGRGTLVTVSSGGGGSGGGGSGGGGSSYVLTQPPSVSVSPGQTASITCSGDGLSKKYVSWYQQKAGQSPVVLISRDKERPSGIPDRFSGSNSADTATLTISGTQAMDEADYYCQAWDDTTVVFGGGTKLTVL

SEQ ID NO: 745 - protein, 123 aa, Artificial Sequence
  Description of Artificial Sequence: Synthetic polypeptide
QVQLQESGPGLVKPSQTLSLTCTVSGGSISSGGYYWSWIRQHPGKGLEWIGYIYYSGSTYYNPSLKSRVTISVDTSKNQFSLKLSSVTAADTAVYYCARAGIAARLRGAFDIWGQGTMVTVSS

SEQ ID NO: 746 - protein, 107 aa, Artificial Sequence
  Description of Artificial Sequence: Synthetic polypeptide
DIVMTQSPSSVSASVGDRVIITCRASQGIRNWLAWYQQKPGKAPNLLIYAASNLQSGVPSRFSGSGSGADFTLTISSLQPEDVATYYCQKYNSAPFTFGPGTKVDIK

SEQ ID NO: 747 - protein, 245 aa, Artificial Sequence
  Description of Artificial Sequence: Synthetic polypeptide
QVQLQESGPGLVKPSQTLSLTCTVSGGSISSGGYYWSWIRQHPGKGLEWIGYIYYSGSTYYNPSLKSRVTISVDTSKNQFSLKLSSVTAADTAVYYCARAGIAARLRGAFDIWGQGTMVTVSSGGGGSGGGGSGGGGSDIVMTQSPSSVSASVGDRVIITCRASQGIRNWLAWYQQKPGKAPNLLIYAASNLQSGVPSRFSGSGSGADFTLTISSLQPEDVATYYCQKYNSAPFTFGPGTKVDIK

SEQ ID NO: 748 - protein, 129 aa, Artificial Sequence
  Description of Artificial Sequence: Synthetic polypeptide
QVQLVQSGAEVKKPGSSVKVSCKASGGTFSSYAISWVRQAPGQGLEWMGGIIPIFGTANYAQKFQGRVTITADESTSTAYMELSSLRSEDTAVYYCARRGGYQLLRWDVGLLRSAFDIWGQGTMVTVSS

SEQ ID NO: 749 - protein, 109 aa, Artificial Sequence
  Description of Artificial Sequence: Synthetic polypeptide
SYVLTQPPSVSVAPGQTARITCGGNNIGSKSVHWYQQKPGQAPVLVLYGKNNRPSGVPDRFSGSRSGTTASLTITGAQAEDEADYYCSSRDSSGDHLRVFGTGTKVTVL

SEQ ID NO: 750 - protein, 253 aa, Artificial Sequence
  Description of Artificial Sequence: Synthetic polypeptide
QVQLVQSGAEVKKPGSSVKVSCKASGGTFSSYAISWVRQAPGQGLEWMGGIIPIFGTANYAQKFQGRVTITADESTSTAYMELSSLRSEDTAVYYCARRGGYQLLRWDVGLLRSAFDIWGQGTMVTVSSGGGGSGGGGSGGGGSSYVLTQPPSVSVAPGQTARITCGGNNIGSKSVHWYQQKPGQAPVLVLYGKNNRPSGVPDRFSGSRSGTTASLTITGAQAEDEADYYCSSRDSSGDHLRVFGTGTKVTVL

SEQ ID NO: 751 - protein, 125 aa, Artificial Sequence
  Description of Artificial Sequence: Synthetic polypeptide
EVQLQQSGPGLVKPSQTLSLTCAISGDSVSSNSAAWNWIRQSPSRGLEWLGRTYYRSKWYSFYAISLKSRIIINPDTSKNQFSLQLKSVTPEDTAVYYCARSSPEGLFLYWFDPWGQGTLVTVSS

SEQ ID NO: 752 - protein, 108 aa, Artificial Sequence
  Description of Artificial Sequence: Synthetic polypeptide
SSELTQDPAVSVALGQTIRITCQGDSLGNYYATWYQQKPGQAPVLVIYGTNNRPSGIPDRFSASSSGNTASLTITGAQAEDEADYYCNSRDSSGHHLLFGTGTKVTVL

SEQ ID NO: 753 - protein, 248 aa, Artificial Sequence
  Description of Artificial Sequence: Synthetic polypeptide
EVQLQQSGPGLVKPSQTLSLTCAISGDSVSSNSAAWNWIRQSPSRGLEWLGRTYYRSKWYSFYAISLKSRIIINPDTSKNQFSLQLKSVTPEDTAVYYCARSSPEGLFLYWFDPWGQGTLVTVSSGGDGSGGGGSGGGGSSSELTQDPAVSVALGQTIRITCQGDSLGNYYATWYQQKPGQAPVLVIYGTNNRPSGIPDRFSASSSGNTASLTITGAQAEDEADYYCNSRDSSGHHLLFGTGTKVTVL

SEQ ID NO: 754 - protein, 118 aa, Artificial Sequence
  Description of Artificial Sequence: Synthetic polypeptide
EVQLVESGGGLVQPGGSLRLSCAASGFTFSSYAMSWVRQAPGKGLEWVSAISGSGGSTYYADSVKGRFTISRDNSKNTLYLQMNSLRAEDTAVYYCAKVEGSGSLDYWGQGTLVTVSS

SEQ ID NO: 755 - protein, 113 aa, Artificial Sequence
  Description of Artificial Sequence: Synthetic polypeptide
EIVMTQSPGTLSLSPGERATLSCRASQSVSSAYLAWYQQKPGQPPRLLISGASTRATGIPDRFGGSGSGTDFTLTISRLEPEDFAVYYCQHYGSSFNGSSLFTFGQGTRLEIK

SEQ ID NO: 756 - protein, 246 aa, Artificial Sequence
  Description of Artificial Sequence: Synthetic polypeptide
EVQLVESGGGLVQPGGSLRLSCAASGFTFSSYAMSWVRQAPGKGLEWVSAISGSGGSTYYADSVKGRFTISRDNSKNTLYLQMNSLRAEDTAVYYCAKVEGSGSLDYWGQGTLVTVSSGGGGSGGGGSGGGGSEIVMTQSPGTLSLSPGERATLSCRASQSVSSAYLAWYQQKPGQPPRLLISGASTRATGIPDRFGGSGSGTDFTLTISRLEPEDFAVYYCQHYGSSFNGSSLFTFGQGTRLEIK

SEQ ID NO: 757 - protein, 118 aa, Artificial Sequence
  Description of Artificial Sequence: Synthetic polypeptide
EVQLVETGGGLVQPGGSLRLSCAASGITFSRYPMSWVRQAPGKGLEWVSGISDSGVSTYYADSAKGRFTISRDNSKNTLFLQMSSLRDEDTAVYYCVTRAGSEASDIWGQGTMVTVSS

SEQ ID NO: 758 - protein, 108 aa, Artificial Sequence
  Description of Artificial Sequence: Synthetic polypeptide
EIVLTQSPATLSLSPGERATLSCRASQSVSNSLAWYQQKPGQAPRLLIYDASSRATGIPDRFSGSGSGTDFTLTISRLEPEDFAIYYCQQFGTSSGLTFGGGTKLEIK

SEQ ID NO: 759 - protein, 241 aa, Artificial Sequence
  Description of Artificial Sequence: Synthetic polypeptide
EVQLVETGGGLVQPGGSLRLSCAASGITFSRYPMSWVRQAPGKGLEWVSGISDSGVSTYYADSAKGRFTISRDNSKNTLFLQMSSLRDEDTAVYYCVTRAGSEASDIWGQGTMVTVSSGGGGSGGGGSGGGGSEIVLTQSPATLSLSPGERATLSCRASQSVSNSLAWYQQKPGQAPRLLIYDASSRATGIPDRFSGSGSGTDFTLTISRLEPEDFAIYYCQQFGTSSGLTFGGGTKLEIK

SEQ ID NO: 760 - protein, 124 aa, Artificial Sequence
  Description of Artificial Sequence: Synthetic polypeptide
QVQLVESGGGLVQPGGSLRLSCAASGFTFSSYAMSWVRQAPGKGLEWVSAISGSGGSTYYADSVKGRFTISRDNAKNSLYLQMNSLRAEDTAIYYCARATYKRELRYYYGMDVWGQGTMVTVSS

SEQ ID NO: 761 - protein, 109 aa, Artificial Sequence
  Description of Artificial Sequence: Synthetic polypeptide
EIVMTQSPGTVSLSPGERATLSCRASQSVSSSFLAWYQQKPGQAPRLLIYGASSRATGIPDRFSGSGSGTDFTLTISRLEPEDSAVYYCQQYHSSPSWTFGQGTRLEIK

SEQ ID NO: 762 - protein, 248 aa, Artificial Sequence
  Description of Artificial Sequence: Synthetic polypeptide
QVQLVESGGGLVQPGGSLRLSCAASGFTFSSYAMSWVRQAPGKGLEWVSAISGSGGSTYYADSVKGRFTISRDNAKNSLYLQMNSLRAEDTAIYYCARATYKRELRYYYGMDVWGQGTMVTVSSGGGGSGGGGSGGGGSEIVMTQSPGTVSLSPGERATLSCRASQSVSSSFLAWYQQKPGQAPRLLIYGASSRATGIPDRFSGSGSGTDFTLTISRLEPEDSAVYYCQQYHSSPSWTFGQGTRLEIK

SEQ ID NO: 763 - protein, 124 aa, Artificial Sequence
  Description of Artificial Sequence: Synthetic polypeptide
EVQLVETGGGLVQPGGSLRLSCAASGFTFSSYAMSWVRQAPGKGLEWVSAISGSGGSTYYADSVKGRFTISRDNSKNTLYLQMNTLKAEDTAVYYCARATYKRELRYYYGMDVWGQGTTVTVSS

SEQ ID NO: 764 - protein, 109 aa, Artificial Sequence
  Description of Artificial Sequence: Synthetic polypeptide
EIVLTQSPSTLSLSPGESATLSCRASQSVSTTFLAWYQQKPGQAPRLLIYGSSNRATGIPDRFSGSGSGTDFTLTIRRLEPEDFAVYYCQQYHSSPSWTFGQGTKVEIK

SEQ ID NO: 765 - protein, 248 aa, Artificial Sequence
  Description of Artificial Sequence: Synthetic polypeptide
EVQLVETGGGLVQPGGSLRLSCAASGFTFSSYAMSWVRQAPGKGLEWVSAISGSGGSTYYADSVKGRFTISRDNSKNTLYLQMNTLKAEDTAVYYCARATYKRELRYYYGMDVWGQGTTVTVSSGGGGSGGGGSGGGGSEIVLTQSPSTLSLSPGESATLSCRASQSVSTTFLAWYQQKPGQAPRLLIYGSSNRATGIPDRFSGSGSGTDFTLTIRRLEPEDFAVYYCQQYHSSPSWTFGQGTKVEIK

SEQ ID NO: 766 - protein, 117 aa, Artificial Sequence
  Description of Artificial Sequence: Synthetic polypeptide
EVQLVETGGGLVQPGRSLRLSCAASGFTFDDYAMHWVRQAPGKGLEWVSGISWNSGSIGYADSVKGRFTISRDNAKNSLYLQMNSLRDEDTAVYYCARVGKAVPDVWGQGTTVTVSS

SEQ ID NO: 767 - protein, 107 aa, Artificial Sequence
  Description of Artificial Sequence: Synthetic polypeptide
DIVMTQTPSSLSASVGDRVTITCRASQSISSYLNWYQQKPGKAPKLLIYAASSLQSGVPSRFSGSGSGTDFTLTISSLQPEDFATYYCQQSYSTPYSFGQGTRLEIK

SEQ ID NO: 768 - protein, 239 aa, Artificial Sequence
  Description of Artificial Sequence: Synthetic polypeptide
EVQLVETGGGLVQPGRSLRLSCAASGFTFDDYAMHWVRQAPGKGLEWVSGISWNSGSIGYADSVKGRFTISRDNAKNSLYLQMNSLRDEDTAVYYCARVGKAVPDVWGQGTTVTVSSGGGGSGGGGSGGGGSDIVMTQTPSSLSASVGDRVTITCRASQSISSYLNWYQQKPGKAPKLLIYAASSLQSGVPSRFSGSGSGTDFTLTISSLQPEDFATYYCQQSYSTPYSFGQGTRLEIK

SEQ ID NO: 769 - protein, 122 aa, Artificial Sequence
  Description of Artificial Sequence: Synthetic polypeptide
EVQLVESGGGLVQPGRSLRLSCTASGFTFDDYAMHWVRQRPGKGLEWVASINWKGNSLAYGDSVKGRFAISRDNAKNTVFLQMNSLRTEDTAVYYCASHQGVAYYNYAMDVWGRGTLVTVSS

SEQ ID NO: 770 - protein, 109 aa, Artificial Sequence
  Description of Artificial Sequence: Synthetic polypeptide
EIVLTQSPGTLSLSPGERATLSCRATQSIGSSFLAWYQQRPGQAPRLLIYGASQRATGIPDRFSGRGSGTDFTLTISRVEPEDSAVYYCQHYESSPSWTFGQGTKVEIK

SEQ ID NO: 771 - protein, 246 aa, Artificial Sequence
  Description of Artificial Sequence: Synthetic polypeptide
EVQLVESGGGLVQPGRSLRLSCTASGFTFDDYAMHWVRQRPGKGLEWVASINWKGNSLAYGDSVKGRFAISRDNAKNTVFLQMNSLRTEDTAVYYCASHQGVAYYNYAMDVWGRGTLVTVSSGGGGSGGGGSGGGGSEIVLTQSPGTLSLSPGERATLSCRATQSIGSSFLAWYQQRPGQAPRLLIYGASQRATGIPDRFSGRGSGTDFTLTISRVEPEDSAVYYCQHYESSPSWTFGQGTKVEIK

SEQ ID NO: 772 - protein, 117 aa, Artificial Sequence
  Description of Artificial Sequence: Synthetic polypeptide
EVQLVESGGGLVQPGGSLRLSCAASGFTFSSYAMSWVRQAPGKGLEWVSAISGSGGSTYYADSVKGRFTISRDNSKNTLYLQMNSLRAEDTAVYYCAKVVRDGMDVWGQGTTVTVSS

SEQ ID NO: 773 - protein, 109 aa, Artificial Sequence
  Description of Artificial Sequence: Synthetic polypeptide
EIVLTQSPATLSLSPGERATLSCRASQSVSSSYLAWYQQKPGQAPRLLIYGASSRATGIPDRFSGNGSGTDFTLTISRLEPEDFAVYYCQQYGSPPRFTFGPGTKVDIK

SEQ ID NO: 774 - protein, 241 aa, Artificial Sequence
  Description of Artificial Sequence: Synthetic polypeptide
EVQLVESGGGLVQPGGSLRLSCAASGFTFSSYAMSWVRQAPGKGLEWVSAISGSGGSTYYADSVKGRFTISRDNSKNTLYLQMNSLRAEDTAVYYCAKVVRDGMDVWGQGTTVTVSSGGGGSGGGGSGGGGSEIVLTQSPATLSLSPGERATLSCRASQSVSSSYLAWYQQKPGQAPRLLIYGASSRATGIPDRFSGNGSGTDFTLTISRLEPEDFAVYYCQQYGSPPRFTFGPGTKVDIK

SEQ ID NO: 775 - protein, 118 aa, Artificial Sequence
  Description of Artificial Sequence: Synthetic polypeptide
EVQLLESGGGLVQPGGSLRLSCAASGFTFSSYAMSWVRQAPGKGLEWVSAISGSGGSTYYADSVKGRFTISRDNSKNTLYLQMNSLRAEDTAVYYCAKIPQTGTFDYWGQGTLVTVSS

SEQ ID NO: 776 - protein, 109 aa, Artificial Sequence
  Description of Artificial Sequence: Synthetic polypeptide
EIVLTQSPGTLSLSPGERATLSCRASQSVSSSYLAWYQQRPGQAPRLLIYGASSRATGIPDRFSGSGSGTDFTLTISRLEPEDFAVYYCQHYGSSPSWTFGQGTRLEIK

SEQ ID NO: 777 - protein, 242 aa, Artificial Sequence
  Description of Artificial Sequence: Synthetic polypeptide
EVQLLESGGGLVQPGGSLRLSCAASGFTFSSYAMSWVRQAPGKGLEWVSAISGSGGSTYYADSVKGRFTISRDNSKNTLYLQMNSLRAEDTAVYYCAKIPQTGTFDYWGQGTLVTVSSGGGGSGGGGSGGGGSEIVLTQSPGTLSLSPGERATLSCRASQSVSSSYLAWYQQRPGQAPRLLIYGASSRATGIPDRFSGSGSGTDFTLTISRLEPEDFAVYYCQHYGSSPSWTFGQGTRLEIK

SEQ ID NO: 778 - protein, 124 aa, Artificial Sequence
  Description of Artificial Sequence: Synthetic polypeptide
EVQLVETGGGLVQPGGSLRLSCAASGFTFSSYAMSWVRQAPGKGLEWVSAISGSGGSTYYADSVKGRFTMSRENDKNSVFLQMNSLRVEDTGVYYCARANYKRELRYYYGMDVWGQGTMVTVSS

SEQ ID NO: 779 - protein, 109 aa, Artificial Sequence
  Description of Artificial Sequence: Synthetic polypeptide
EIVMTQSPGTLSLSPGESATLSCRASQRVASNYLAWYQHKPGQAPSLLISGASSRATGVPDRFSGSGSGTDFTLAISRLEPEDSAVYYCQHYDSSPSWTFGQGTKVEIK

SEQ ID NO: 780 - protein, 248 aa, Artificial Sequence
  Description of Artificial Sequence: Synthetic polypeptide
EVQLVETGGGLVQPGGSLRLSCAASGFTFSSYAMSWVRQAPGKGLEWVSAISGSGGSTYYADSVKGRFTMSRENDKNSVFLQMNSLRVEDTGVYYCARANYKRELRYYYGMDVWGQGTMVTVSSGGGGSGGGGSGGGGSEIVMTQSPGTLSLSPGESATLSCRASQRVASNYLAWYQHKPGQAPSLLISGASSRATGVPDRFSGSGSGTDFTLAISRLEPEDSAVYYCQHYDSSPSWTFGQGTKVEIK

SEQ ID NO: 781 - protein, 120 aa, Artificial Sequence
  Description of Artificial Sequence: Synthetic polypeptide
EVQLLETGGGLVQPGGSLRLSCAASGFSFSSYAMSWVRQAPGKGLEWVSAISGSGGSTYYADSVKGRFTISRDNSKNTLYLQMNSLRAEDTAVYYCAKALVGATGAFDIWGQGTLVTVSS

SEQ ID NO: 782 - protein, 109 aa, Artificial Sequence
  Description of Artificial Sequence: Synthetic polypeptide
EIVLTQSPGTLSLSPGERATLSCRASQSLSSNFLAWYQQKPGQAPGLLIYGASNWATGTPDRFSGSGSGTDFTLTITRLEPEDFAVYYCQYYGTSPMYTFGQGTKVEIK

SEQ ID NO: 783 - protein, 244 aa, Artificial Sequence
  Description of Artificial Sequence: Synthetic polypeptide
EVQLLETGGGLVQPGGSLRLSCAASGFSFSSYAMSWVRQAPGKGLEWVSAISGSGGSTYYADSVKGRFTISRDNSKNTLYLQMNSLRAEDTAVYYCAKALVGATGAFDIWGQGTLVTVSSGGGGSGGGGSGGGGSEIVLTQSPGTLSLSPGERATLSCRASQSLSSNFLAWYQQKPGQAPGLLIYGASNWATGTPDRFSGSGSGTDFTLTITRLEPEDFAVYYCQYYGTSPMYTFGQGTKVEIK

SEQ ID NO: 784 - protein, 117 aa, Artificial Sequence
  Description of Artificial Sequence: Synthetic polypeptide
EVQLLESGGGLVQPGGSLRLSCAASGFTFSSYAMSWVRQAPGKGLEWVSAISGSGGSTYYADSVKGRFTISRDNSKNTLYLQMNSLRAEDTAVYYCVLWFGEGFDPWGQGTLVTVSS

SEQ ID NO: 785 - protein, 112 aa, Artificial Sequence
  Description of Artificial Sequence: Synthetic polypeptide
DIVLTQSPLSLPVTPGEPASISCRSSQSLLHSNGYNYLDWYLQKPGQSPQLLIYLGSNRASGVPDRFSGSGSGTDFTLKISRVEAEDVGVYYCMQALQTPLTFGGGTKVDIK

SEQ ID NO: 786 - protein, 244 aa, Artificial Sequence
  Description of Artificial Sequence: Synthetic polypeptide
EVQLLESGGGLVQPGGSLRLSCAASGFTFSSYAMSWVRQAPGKGLEWVSAISGSGGSTYYADSVKGRFTISRDNSKNTLYLQMNSLRAEDTAVYYCVLWFGEGFDPWGQGTLVTVSSGGGGSGGGGSGGGGSDIVLTQSPLSLPVTPGEPASISCRSSQSLLHSNGYNYLDWYLQKPGQSPQLLIYLGSNRASGVPDRFSGSGSGTDFTLKISRVEAEDVGVYYCMQALQTPLTFGGGTKVDIK

SEQ ID NO: 787 - protein, 126 aa, Artificial Sequence
  Description of Artificial Sequence: Synthetic polypeptide
QVQLVESGGGLVQPGGSLRLSCAASGFTFSSYAMSWVRQAPGKGLEWVSAISGSGGSTYYADSVKGRFTISRDNSKNTLYLQMNSLRAEDTAVYYCAKVGYDSSGYYRDYYGMDVWGQGTTVTVSS

SEQ ID NO: 788 - protein, 110 aa, Artificial Sequence
  Description of Artificial Sequence: Synthetic polypeptide
EIVLTQSPGTLSLSPGERATLSCRASQSVSSSYLAWYQQKPGQAPRLLIYGTSSRATGISDRFSGSGSGTDFTLTISRLEPEDFAVYYCQHYGNSPPKFTFGPGTKLEIK

SEQ ID NO: 789 - protein, 251 aa, Artificial Sequence
  Description of Artificial Sequence: Synthetic polypeptide
QVQLVESGGGLVQPGGSLRLSCAASGFTFSSYAMSWVRQAPGKGLEWVSAISGSGGSTYYADSVKGRFTISRDNSKNTLYLQMNSLRAEDTAVYYCAKVGYDSSGYYRDYYGMDVWGQGTTVTVSSGGGGSGGGGSGGGGSEIVLTQSPGTLSLSPGERATLSCRASQSVSSSYLAWYQQKPGQAPRLLIYGTSSRATGISDRFSGSGSGTDFTLTISRLEPEDFAVYYCQHYGNSPPKFTFGPGTKLEIK

SEQ ID NO: 790 - protein, 122 aa, Artificial Sequence
  Description of Artificial Sequence: Synthetic polypeptide
EVQLVESGGGLVQPGGSLRLSCAASGFTFSSYAMSWVRQAPGKGLEWVSAISGSGGSTYYADSVKGRFTISRDNSKNTLYLQMNSLRAEDTAVYYCAKMGWSSGYLGAFDIWGQGTTVTVSS

SEQ ID NO: 791 - protein, 109 aa, Artificial Sequence
  Description of Artificial Sequence: Synthetic polypeptide
EIVLTQSPGTLSLSPGERATLSCRASQSVASSFLAWYQQKPGQAPRLLIYGASGRATGIPDRFSGSGSGTDFTLTISRLEPEDFAVYYCQHYGGSPRLTFGGGTKVDIK

SEQ ID NO: 792 - protein, 246 aa, Artificial Sequence
  Description of Artificial Sequence: Synthetic polypeptide
EVQLVESGGGLVQPGGSLRLSCAASGFTFSSYAMSWVRQAPGKGLEWVSAISGSGGSTYYADSVKGRFTISRDNSKNTLYLQMNSLRAEDTAVYYCAKMGWSSGYLGAFDIWGQGTTVTVSSGGGGSGGGGSGGGGSEIVLTQSPGTLSLSPGERATLSCRASQSVASSFLAWYQQKPGQAPRLLIYGASGRATGIPDRFSGSGSGTDFTLTISRLEPEDFAVYYCQHYGGSPRLTFGGGTKVDIK

SEQ ID NO: 793 - protein, 122 aa, Artificial Sequence
  Description of Artificial Sequence: Synthetic polypeptide
QIQLVQSGPDLKKPGETVKLSCKASGYTFTNFGMNWVKQAPGKGFKWMAWINTYTGESYFADDFKGRFAFSVETSATTAYLQINNLKTEDTATYFCARGEIYYGYDGGFAYWGQGTLVTVSA

SEQ ID NO: 794 - protein, 107 aa, Artificial Sequence
  Description of Artificial Sequence: Synthetic polypeptide
DVVMTQSHRFMSTSVGDRVSITCRASQDVNTAVSWYQQKPGQSPKLLIFSASYRYTGVPDRFTGSGSGADFTLTISSVQAEDLAVYYCQQHYSTPWTFGGGTKLDIK

SEQ ID NO: 795 - protein, 244 aa, Artificial Sequence
  Description of Artificial Sequence: Synthetic polypeptide
QIQLVQSGPDLKKPGETVKLSCKASGYTFTNFGMNWVKQAPGKGFKWMAWINTYTGESYFADDFKGRFAFSVETSATTAYLQINNLKTEDTATYFCARGEIYYGYDGGFAYWGQGTLVTVSAGGGGSGGGGSGGGGSDVVMTQSHRFMSTSVGDRVSITCRASQDVNTAVSWYQQKPGQSPKLLIFSASYRYTGVPDRFTGSGSGADFTLTISSVQAEDLAVYYCQQHYSTPWTFGGGTKLDIK

SEQ ID NO: 796 - protein, 117 aa, Artificial Sequence
  Description of Artificial Sequence: Synthetic polypeptide
QIQLVQSGPELKKPGETVKISCKASGYTFTDYSINWVKRAPGKGLKWMGWINTETREPAYAYDFRGRFAFSLETSASTAYLQINNLKYEDTATYFCALDYSYAMDYWGQGTSVTVSS

SEQ ID NO: 797 - protein, 111 aa, Artificial Sequence
  Description of Artificial Sequence: Synthetic polypeptide
DIVLTQSPASLAMSLGKRATISCRASESVSVIGAHLIHWYQQKPGQPPKLLIYLASNLETGVPARFSGSGSGTDFTLTIDPVEEDDVAIYSCLQSRIFPRTFGGGTKLEIK

SEQ ID NO: 798 - protein, 249 aa, Artificial Sequence
  Description of Artificial Sequence: Synthetic polypeptide
QIQLVQSGPELKKPGETVKISCKASGYTFTDYSINWVKRAPGKGLKWMGWINTETREPAYAYDFRGRFAFSLETSASTAYLQINNLKYEDTATYFCALDYSYAMDYWGQGTSVTVSSGGGGSGGGGSGGGGSQIQLVQSGPELKKPGETVKISCKASGYTFTDYSINWVKRAPGKGLKWMGWINTETREPAYAYDFRGRFAFSLETSASTAYLQINNLKYEDTATYFCALDYSYAMDYWGQGTSVTVSS

SEQ ID NO: 799 - protein, 117 aa, Artificial Sequence
  Description of Artificial Sequence: Synthetic polypeptide
QIQLVQSGPELKKPGETVKISCKASGYTFRHYSMNWVKQAPGKGLKWMGRINTESGVPIYADDFKGRFAFSVETSASTAYLVINNLKDEDTASYFCSNDYLYSLDFWGQGTALTVSS

SEQ ID NO: 800 - protein, 111 aa, Artificial Sequence
  Description of Artificial Sequence: Synthetic polypeptide
DIVLTQSPPSLAMSLGKRATISCRASESVTILGSHLIYWYQQKPGQPPTLLIQLASNVQTGVPARFSGSGSRTDFTLTIDPVEEDDVAVYYCLQSRTIPRTFGGGTKLEIK

SEQ ID NO: 801 - protein, 243 aa, Artificial Sequence
  Description of Artificial Sequence: Synthetic polypeptide
QIQLVQSGPELKKPGETVKISCKASGYTFRHYSMNWVKQAPGKGLKWMGRINTESGVPIYADDFKGRFAFSVETSASTAYLVINNLKDEDTASYFCSNDYLYSLDFWGQGTALTVSSGGGGSGGGGSGGGGSDIVLTQSPPSLAMSLGKRATISCRASESVTILGSHLIYWYQQKPGQPPTLLIQLASNVQTGVPARFSGSGSRTDFTLTIDPVEEDDVAVYYCLQSRTIPRTFGGGTKLEIK

SEQ ID NO: 802 - protein, 117 aa, Artificial Sequence
  Description of Artificial Sequence: Synthetic polypeptide
QIQLVQSGPELKKPGETVKISCKASGYTFTHYSMNWVKQAPGKGLKWMGRINTETGEPLYADDFKGRFAFSLETSASTAYLVINNLKNEDTATFFCSNDYLYSCDYWGQGTTLTVSS

SEQ ID NO: 803 - protein, 243 aa, Artificial Sequence
  Description of Artificial Sequence: Synthetic polypeptide
QIQLVQSGPELKKPGETVKISCKASGYTFTHYSMNWVKQAPGKGLKWMGRINTETGEPLYADDFKGRFAFSLETSASTAYLVINNLKNEDTATFFCSNDYLYSCDYWGQGTTLTVSSGGGGSGGGGSGGGGSDIVLTQSPPSLAMSLGKRATISCRASESVTILGSHLIYWYQQKPGQPPTLLIQLASNVQTGVPARFSGSGSRTDFTLTIDPVEEDDVAVYYCLQSRTIPRTFGGGTKLEIK

SEQ ID NO: 804 - protein, 11 aa, Artificial Sequence
  Description of Artificial Sequence: Synthetic peptide
RASQSISSYLN

SEQ ID NO: 805 - protein, 12 aa, Artificial Sequence
  Description of Artificial Sequence: Synthetic peptide
RASQSISSSFLA

SEQ ID NO: 806 - protein, 16 aa, Artificial Sequence
  Description of Artificial Sequence: Synthetic peptide
RSSQSLLHSNGYNYLD

SEQ ID NO: 807 - protein, 16 aa, Artificial Sequence
  Description of Artificial Sequence: Synthetic peptide
KSSQSLLRNDGKTPLY

SEQ ID NO: 808 - protein, 16 aa, Artificial Sequence
  Description of Artificial Sequence: Synthetic peptide
RSSQSLLHSNGYNYLN

SEQ ID NO: 809 - protein, 16 aa, Artificial Sequence
  Description of Artificial Sequence: Synthetic peptide
RSSQSLLYSNGYNYVD

SEQ ID NO: 810 - protein, 11 aa, Artificial Sequence
  Description of Artificial Sequence: Synthetic peptide
RASQSVSSNLA

SEQ ID NO: 811 - protein, 11 aa, Artificial Sequence
  Description of Artificial Sequence: Synthetic peptide
RASQSVSSKLA

SEQ ID NO: 812 - protein, 12 aa, Artificial Sequence
  Description of Artificial Sequence: Synthetic peptide
RASQSVGSTNLA

SEQ ID NO: 813 - protein, 16 aa, Artificial Sequence
  Description of Artificial Sequence: Synthetic peptide
KSSESLVHNSGKTYLN

SEQ ID NO: 814 - protein, 11 aa, Artificial Sequence
  Description of Artificial Sequence: Synthetic peptide
QASEDINKFLN

SEQ ID NO: 815 - protein, 11 aa, Artificial Sequence
  Description of Artificial Sequence: Synthetic peptide
RASQSVGSNLA

SEQ ID NO: 816 - protein, 12 aa, Artificial Sequence
  Description of Artificial Sequence: Synthetic peptide
RASQSIGSSSLA

SEQ ID NO: 817 - protein, 11 aa, Artificial Sequence
  Description of Artificial Sequence: Synthetic peptide
KASQDIDDAMN

SEQ ID NO: 818 - protein, 11 aa, Artificial Sequence
  Description of Artificial Sequence: Synthetic peptide
RASQDIYNNLA

SEQ ID NO: 819 - protein, 11 aa, Artificial Sequence
  Description of Artificial Sequence: Synthetic peptide
GGNNIGTKSVH

SEQ ID NO: 820 - protein, 11 aa, Artificial Sequence
  Description of Artificial Sequence: Synthetic peptide
SGDGLSKKYVS

SEQ ID NO: 821 - protein, 11 aa, Artificial Sequence
  Description of Artificial Sequence: Synthetic peptide
RASQGIRNWLA

SEQ ID NO: 822 - protein, 11 aa, Artificial Sequence
  Description of Artificial Sequence: Synthetic peptide
GGNNIGSKSVH

SEQ ID NO: 823 - protein, 11 aa, Artificial Sequence
  Description of Artificial Sequence: Synthetic peptide
QGDSLGNYYAT

SEQ ID NO: 824 - protein, 12 aa, Artificial Sequence
  Description of Artificial Sequence: Synthetic peptide
RASQSVSSAYLA

SEQ ID NO: 825 - protein, 11 aa, Artificial Sequence
  Description of Artificial Sequence: Synthetic peptide
RASQSVSNSLA

SEQ ID NO: 826 - protein, 12 aa, Artificial Sequence
  Description of Artificial Sequence: Synthetic peptide
RASQSVSSSFLA

SEQ ID NO: 827 - protein, 12 aa, Artificial Sequence
  Description of Artificial Sequence: Synthetic peptide
RASQSVSTTFLA

SEQ ID NO: 828 - protein, 12 aa, Artificial Sequence
  Description of Artificial Sequence: Synthetic peptide
RATQSIGSSFLA

SEQ ID NO: 829 - protein, 12 aa, Artificial Sequence
  Description of Artificial Sequence: Synthetic peptide
RASQSVSSSYLA

SEQ ID NO: 830 - protein, 12 aa, Artificial Sequence
  Description of Artificial Sequence: Synthetic peptide
RASQRVASNYLA

SEQ ID NO: 831 - protein, 12 aa, Artificial Sequence
  Description of Artificial Sequence: Synthetic peptide
RASQSLSSNFLA

SEQ ID NO: 832 - protein, 12 aa, Artificial Sequence
  Description of Artificial Sequence: Synthetic peptide
RASQSVASSFLA

SEQ ID NO: 833 - protein, 11 aa, Artificial Sequence
  Description of Artificial Sequence: Synthetic peptide
RASQDVNTAVS

SEQ ID NO: 834 - protein, 15 aa, Artificial Sequence
  Description of Artificial Sequence: Synthetic peptide
RASESVSVIGAHLIH

SEQ ID NO: 835 - protein, 15 aa, Artificial Sequence
  Description of Artificial Sequence: Synthetic peptide
RASESVTILGSHLIY

SEQ ID NO: 836 - protein, 7 aa, Artificial Sequence
  Description of Artificial Sequence: Synthetic peptide
AASSLQS

SEQ ID NO: 837 - protein, 7 aa, Artificial Sequence
  Description of Artificial Sequence: Synthetic peptide
GASRRAT

SEQ ID NO: 838 - protein, 7 aa, Artificial Sequence
  Description of Artificial Sequence: Synthetic peptide
LGSNRAS

SEQ ID NO: 839 - protein, 7 aa, Artificial Sequence
  Description of Artificial Sequence: Synthetic peptide
EVSNRFS

SEQ ID NO: 840 - protein, 7 aa, Artificial Sequence
  Description of Artificial Sequence: Synthetic peptide
LGSKRAS

SEQ ID NO: 841 - protein, 7 aa, Artificial Sequence
  Description of Artificial Sequence: Synthetic peptide
GASTLAS

SEQ ID NO: 842 - protein, 7 aa, Artificial Sequence
  Description of Artificial Sequence: Synthetic peptide
GASTRAS

SEQ ID NO: 843 - protein, 7 aa, Artificial Sequence
  Description of Artificial Sequence: Synthetic peptide
GASIRAT

SEQ ID NO: 844 - protein, 7 aa, Artificial Sequence
  Description of Artificial Sequence: Synthetic peptide
EVSNRDS

SEQ ID NO: 845 - protein, 7 aa, Artificial Sequence
  Description of Artificial Sequence: Synthetic peptide
DASTLQT

SEQ ID NO: 846 - protein, 7 aa, Artificial Sequence
  Description of Artificial Sequence: Synthetic peptide
GASTRAT

SEQ ID NO: 847 - protein, 7 aa, Artificial Sequence
  Description of Artificial Sequence: Synthetic peptide
GASSRAS

SEQ ID NO: 848 - protein, 7 aa, Artificial Sequence
  Description of Artificial Sequence: Synthetic peptide
SATSPVP

SEQ ID NO: 849 - protein, 7 aa, Artificial Sequence
  Description of Artificial Sequence: Synthetic peptide
AANKSQS

SEQ ID NO: 850 - protein, 7 aa, Artificial Sequence
  Description of Artificial Sequence: Synthetic peptide
DDSVRPS

SEQ ID NO: 851 - protein, 7 aa, Artificial Sequence
  Description of Artificial Sequence: Synthetic peptide
RDKERPS

SEQ ID NO: 852 - protein, 7 aa, Artificial Sequence
  Description of Artificial Sequence: Synthetic peptide
AASNLQS

SEQ ID NO: 853 - protein, 7 aa, Artificial Sequence
  Description of Artificial Sequence: Synthetic peptide
GKNNRPS

SEQ ID NO: 854 - protein, 7 aa, Artificial Sequence
  Description of Artificial Sequence: Synthetic peptide
GTNNRPS

SEQ ID NO: 855 - protein, 7 aa, Artificial Sequence
  Description of Artificial Sequence: Synthetic peptide
DASSRAT

SEQ ID NO: 856 - protein, 7 aa, Artificial Sequence
  Description of Artificial Sequence: Synthetic peptide
GASSRAT

SEQ ID NO: 857 - protein, 7 aa, Artificial Sequence
  Description of Artificial Sequence: Synthetic peptide
GSSNRAT

SEQ ID NO: 858 - protein, 7 aa, Artificial Sequence
  Description of Artificial Sequence: Synthetic peptide
GASQRAT

SEQ ID NO: 859 - protein, 7 aa, Artificial Sequence
  Description of Artificial Sequence: Synthetic peptide
GASNWAT

SEQ ID NO: 860 - protein, 7 aa, Artificial Sequence
  Description of Artificial Sequence: Synthetic peptide
GTSSRAT

SEQ ID NO: 861 - protein, 7 aa, Artificial Sequence
  Description of Artificial Sequence: Synthetic peptide
GASGRAT

SEQ ID NO: 862 - protein, 7 aa, Artificial Sequence
  Description of Artificial Sequence: Synthetic peptide
SASYRYT

SEQ ID NO: 863 - protein, 7 aa, Artificial Sequence
  Description of Artificial Sequence: Synthetic peptide
LASNLET

SEQ ID NO: 864 - protein, 7 aa, Artificial Sequence
  Description of Artificial Sequence: Synthetic peptide
LASNVQT

SEQ ID NO: 865 - protein, 9 aa, Artificial Sequence
  Description of Artificial Sequence: Synthetic peptide
QQSYSTPYT

SEQ ID NO: 866 - protein, 10 aa, Artificial Sequence
  Description of Artificial Sequence: Synthetic peptide
QQYHSSPSWT

SEQ ID NO: 867 - protein, 9 aa, Artificial Sequence
  Description of Artificial Sequence: Synthetic peptide
MQALQTPYT

SEQ ID NO: 868 - protein, 8 aa, Artificial Sequence
  Description of Artificial Sequence: Synthetic peptide
MQNIQFPS

SEQ ID NO: 869 - protein, 8 aa, Artificial Sequence
  Description of Artificial Sequence: Synthetic peptide
QQSYKRAS

SEQ ID NO: 870 - protein, 9 aa, Artificial Sequence
  Description of Artificial Sequence: Synthetic peptide
MQGRQFPYS

SEQ ID NO: 871 - protein, 8 aa, Artificial Sequence
  Description of Artificial Sequence: Synthetic peptide
QQYGSSLT

SEQ ID NO: 872 - protein, 9 aa, Artificial Sequence
  Description of Artificial Sequence: Synthetic peptide
QQYGSSSWT

SEQ ID NO: 873 - protein, 10 aa, Artificial Sequence
  Description of Artificial Sequence: Synthetic peptide
QQYGSSPPWT

SEQ ID NO: 874 - protein, 7 aa, Artificial Sequence
  Description of Artificial Sequence: Synthetic peptide
QQSYTLA

SEQ ID NO: 875 - protein, 9 aa, Artificial Sequence
  Description of Artificial Sequence: Synthetic peptide
MQGTHWPGT

SEQ ID NO: 876 - protein, 9 aa, Artificial Sequence
  Description of Artificial Sequence: Synthetic peptide
QQYESLPLT

SEQ ID NO: 877 - protein, 10 aa, Artificial Sequence
  Description of Artificial Sequence: Synthetic peptide
QQYNDWLPVT

SEQ ID NO: 878 - protein, 10 aa, Artificial Sequence
  Description of Artificial Sequence: Synthetic peptide
QQYAGSPPFT

SEQ ID NO: 879 - protein, 9 aa, Artificial Sequence
  Description of Artificial Sequence: Synthetic peptide
LQHDNFPLT

SEQ ID NO: 880 - protein, 9 aa, Artificial Sequence
  Description of Artificial Sequence: Synthetic peptide
QHYYRFPYS

SEQ ID NO: 881 - protein, 11 aa, Artificial Sequence
  Description of Artificial Sequence: Synthetic peptide
QVWDSDSEHVV

SEQ ID NO: 882 - protein, 9 aa, Artificial Sequence
  Description of Artificial Sequence: Synthetic peptide
QAWDDTTVV

SEQ ID NO: 883 - protein, 9 aa, Artificial Sequence
  Description of Artificial Sequence: Synthetic peptide
QKYNSAPFT

SEQ ID NO: 884 - protein, 12 aa, Artificial Sequence
  Description of Artificial Sequence: Synthetic peptide
SSRDSSGDHLRV

SEQ ID NO: 885 - protein, 11 aa, Artificial Sequence
  Description of Artificial Sequence: Synthetic peptide
NSRDSSGHHLL

SEQ ID NO: 886 - protein, 14 aa, Artificial Sequence
  Description of Artificial Sequence: Synthetic peptide
QHYGSSFNGSSLFT

SEQ ID NO: 887 - protein, 10 aa, Artificial Sequence
  Description of Artificial Sequence: Synthetic peptide
QQFGTSSGLT

SEQ ID NO: 888 - protein, 9 aa, Artificial Sequence
  Description of Artificial Sequence: Synthetic peptide
QQSYSTPYS

SEQ ID NO: 889 - protein, 10 aa, Artificial Sequence
  Description of Artificial Sequence: Synthetic peptide
QHYESSPSWT

SEQ ID NO: 890 - protein, 10 aa, Artificial Sequence
  Description of Artificial Sequence: Synthetic peptide
QQYGSPPRFT

SEQ ID NO: 891 - protein, 10 aa, Artificial Sequence
  Description of Artificial Sequence: Synthetic peptide
QHYGSSPSWT

SEQ ID NO: 892 - protein, 10 aa, Artificial Sequence
  Description of Artificial Sequence: Synthetic peptide
QHYDSSPSWT

SEQ ID NO: 893 - protein, 10 aa, Artificial Sequence
  Description of Artificial Sequence: Synthetic peptide
QYYGTSPMYT

SEQ ID NO: 894 - protein, 9 aa, Artificial Sequence
  Description of Artificial Sequence: Synthetic peptide
MQALQTPLT

SEQ ID NO: 895 - protein, 11 aa, Artificial Sequence
  Description of Artificial Sequence: Synthetic peptide
QHYGNSPPKFT

SEQ ID NO: 896 - protein, 10 aa, Artificial Sequence
  Description of Artificial Sequence: Synthetic peptide
QHYGGSPRLT

SEQ ID NO: 897 - protein, 9 aa, Artificial Sequence
  Description of Artificial Sequence: Synthetic peptide
QQHYSTPWT

SEQ ID NO: 898 - protein, 9 aa, Artificial Sequence
  Description of Artificial Sequence: Synthetic peptide
LQSRIFPRT

SEQ ID NO: 899 - protein, 9 aa, Artificial Sequence
  Description of Artificial Sequence: Synthetic peptide
LQSRTIPRT

SEQ ID NO: 900 - protein, 7 aa, Artificial Sequence
  Description of Artificial Sequence: Synthetic peptide
SQSISSY

SEQ ID NO: 901 - protein, 8 aa, Artificial Sequence
  Description of Artificial Sequence: Synthetic peptide
SQSISSSF

SEQ ID NO: 902 - protein, 12 aa, Artificial Sequence
  Description of Artificial Sequence: Synthetic peptide
SQSLLHSNGYNY

SEQ ID NO: 903 - protein, 12 aa, Artificial Sequence
  Description of Artificial Sequence: Synthetic peptide
SQSLLRNDGKTP

SEQ ID NO: 904 - protein, 12 aa, Artificial Sequence
  Description of Artificial Sequence: Synthetic peptide
SQSLLYSNGYNY

SEQ ID NO: 905 - protein, 7 aa, Artificial Sequence
  Description of Artificial Sequence: Synthetic peptide
SQSVSSN

SEQ ID NO: 906 - protein, 7 aa, Artificial Sequence
  Description of Artificial Sequence: Synthetic peptide
SQSVSSK

SEQ ID NO: 907 - protein, 8 aa, Artificial Sequence
  Description of Artificial Sequence: Synthetic peptide
SQSVGSTN

SEQ ID NO: 908 - protein, 12 aa, Artificial Sequence
  Description of Artificial Sequence: Synthetic peptide
SESLVHNSGKTY

SEQ ID NO: 909 - protein, 7 aa, Artificial Sequence
  Description of Artificial Sequence: Synthetic peptide
SEDINKF

SEQ ID NO: 910 - protein, 7 aa, Artificial Sequence
  Description of Artificial Sequence: Synthetic peptide
SQSVGSN

SEQ ID NO: 911 - protein, 8 aa, Artificial Sequence
  Description of Artificial Sequence: Synthetic peptide
SQSIGSSS

SEQ ID NO: 912 - protein, 7 aa, Artificial Sequence
  Description of Artificial Sequence: Synthetic peptide
SQDIDDA

SEQ ID NO: 913 - protein, 7 aa, Artificial Sequence
  Description of Artificial Sequence: Synthetic peptide
SQDIYNN

SEQ ID NO: 914 - protein, 7 aa, Artificial Sequence
  Description of Artificial Sequence: Synthetic peptide
NNIGTKS

SEQ ID NO: 915 - protein, 7 aa, Artificial Sequence
  Description of Artificial Sequence: Synthetic peptide
DGLSKKY

SEQ ID NO: 916 - protein, 7 aa, Artificial Sequence
  Description of Artificial Sequence: Synthetic peptide
SQGIRNW

SEQ ID NO: 917 - protein, 7 aa, Artificial Sequence
  Description of Artificial Sequence: Synthetic peptide
NNIGSKS

SEQ ID NO: 918 - protein, 7 aa, Artificial Sequence
  Description of Artificial Sequence: Synthetic peptide
DSLGNYY

SEQ ID NO: 919 - protein, 8 aa, Artificial Sequence
  Description of Artificial Sequence: Synthetic peptide
SQSVSSAY

SEQ ID NO: 920 - protein, 7 aa, Artificial Sequence
  Description of Artificial Sequence: Synthetic peptide
SQSVSNS

SEQ ID NO: 921 - protein, 8 aa, Artificial Sequence
  Description of Artificial Sequence: Synthetic peptide
SQSVSSSF

SEQ ID NO: 922 - protein, 8 aa, Artificial Sequence
  Description of Artificial Sequence: Synthetic peptide
SQSVSTTF

SEQ ID NO: 923 - protein, 8 aa, Artificial Sequence
  Description of Artificial Sequence: Synthetic peptide
TQSIGSSF

SEQ ID NO: 924 - protein, 8 aa, Artificial Sequence
  Description of Artificial Sequence: Synthetic peptide
SQSVSSSY

SEQ ID NO: 925 - protein, 8 aa, Artificial Sequence
  Description of Artificial Sequence: Synthetic peptide
SQRVASNY

SEQ ID NO: 926 - protein, 8 aa, Artificial Sequence
  Description of Artificial Sequence: Synthetic peptide
SQSLSSNF

SEQ ID NO: 927 - protein, 8 aa, Artificial Sequence
  Description of Artificial Sequence: Synthetic peptide
SQSVASSF

SEQ ID NO: 928 - protein, 7 aa, Artificial Sequence
  Description of Artificial Sequence: Synthetic peptide
SQDVNTA

SEQ ID NO: 929 - protein, 11 aa, Artificial Sequence
  Description of Artificial Sequence: Synthetic peptide
SESVSVIGAHL

SEQ ID NO: 930 - protein, 11 aa, Artificial Sequence
  Description of Artificial Sequence: Synthetic peptide
SESVTILGSHL

SEQ ID NO: 931 - protein, 3 aa, Artificial Sequence
  Description of Artificial Sequence: Synthetic peptide
AAS

SEQ ID NO: 932 - protein, 3 aa, Artificial Sequence
  Description of Artificial Sequence: Synthetic peptide
GAS

SEQ ID NO: 933 - protein, 3 aa, Artificial Sequence
  Description of Artificial Sequence: Synthetic peptide
LGS

SEQ ID NO: 934 - protein, 3 aa, Artificial Sequence
  Description of Artificial Sequence: Synthetic peptide
EVS

SEQ ID NO: 935 - protein, 3 aa, Artificial Sequence
  Description of Artificial Sequence: Synthetic peptide
SAT

SEQ ID NO: 936 - protein, 3 aa, Artificial Sequence
  Description of Artificial Sequence: Synthetic peptide
AAN

SEQ ID NO: 937 - protein, 3 aa, Artificial Sequence
  Description of Artificial Sequence: Synthetic peptide
DDS

SEQ ID NO: 938 - protein, 3 aa, Artificial Sequence
  Description of Artificial Sequence: Synthetic peptide
RDK

SEQ ID NO: 939 - protein, 3 aa, Artificial Sequence
  Description of Artificial Sequence: Synthetic peptide
GKN

SEQ ID NO: 940 - protein, 3 aa, Artificial Sequence
  Description of Artificial Sequence: Synthetic peptide
GSS

SEQ ID NO: 941 - protein, 3 aa, Artificial Sequence
  Description of Artificial Sequence: Synthetic peptide
GTS

SEQ ID NO: 942 - protein, 3 aa, Artificial Sequence
  Description of Artificial Sequence: Synthetic peptide
SAS

SEQ ID NO: 943 - protein, 3 aa, Artificial Sequence
  Description of Artificial Sequence: Synthetic peptide
LAS

SEQ ID NO: 944 - protein, 6 aa, Artificial Sequence
  Description of Artificial Sequence: Synthetic peptide
SYSTPY

SEQ ID NO: 945 - protein, 7 aa, Artificial Sequence
  Description of Artificial Sequence: Synthetic peptide
YHSSPSW

SEQ ID NO: 946 - protein, 6 aa, Artificial Sequence
  Description of Artificial Sequence: Synthetic peptide
ALQTPY

SEQ ID NO: 947 - protein, 5 aa, Artificial Sequence
  Description of Artificial Sequence: Synthetic peptide
NIQFP

SEQ ID NO: 948 - protein, 5 aa, Artificial Sequence
  Description of Artificial Sequence: Synthetic peptide
SYKRA

SEQ ID NO: 949 - protein, 6 aa, Artificial Sequence
  Description of Artificial Sequence: Synthetic peptide
GRQFPY

SEQ ID NO: 950 - protein, 5 aa, Artificial Sequence
  Description of Artificial Sequence: Synthetic peptide
YGSSL

SEQ ID NO: 951 - protein, 6 aa, Artificial Sequence
  Description of Artificial Sequence: Synthetic peptide
YGSSSW

SEQ ID NO: 952 - protein, 7 aa, Artificial Sequence
  Description of Artificial Sequence: Synthetic peptide
YGSSPPW

SEQ ID NO: 953 - protein, 4 aa, Artificial Sequence
  Description of Artificial Sequence: Synthetic peptide
SYTL

SEQ ID NO: 954 - protein, 6 aa, Artificial Sequence
  Description of Artificial Sequence: Synthetic peptide
GTHWPG

SEQ ID NO: 955 - protein, 6 aa, Artificial Sequence
  Description of Artificial Sequence: Synthetic peptide
YESLPL

SEQ ID NO: 956 - protein, 7 aa, Artificial Sequence
  Description of Artificial Sequence: Synthetic peptide
YNDWLPV

SEQ ID NO: 957 - protein, 7 aa, Artificial Sequence
  Description of Artificial Sequence: Synthetic peptide
YAGSPPF

SEQ ID NO: 958 - protein, 6 aa, Artificial Sequence
  Description of Artificial Sequence: Synthetic peptide
HDNFPL

SEQ ID NO: 959 - protein, 6 aa, Artificial Sequence
  Description of Artificial Sequence: Synthetic peptide
YYRFPY

SEQ ID NO: 960 - protein, 8 aa, Artificial Sequence
  Description of Artificial Sequence: Synthetic peptide
WDSDSEHV

SEQ ID NO: 961 - protein, 6 aa, Artificial Sequence
  Description of Artificial Sequence: Synthetic peptide
WDDTTV

SEQ ID NO: 962 - protein, 6 aa, Artificial Sequence
  Description of Artificial Sequence: Synthetic peptide
YNSAPF

SEQ ID NO: 963 - protein, 9 aa, Artificial Sequence
  Description of Artificial Sequence: Synthetic peptide
RDSSGDHLR

SEQ ID NO: 964 - protein, 8 aa, Artificial Sequence
  Description of Artificial Sequence: Synthetic peptide
RDSSGHHL

SEQ ID NO: 965 - protein, 11 aa, Artificial Sequence
  Description of Artificial Sequence: Synthetic peptide
YGSSFNGSSLF

SEQ ID NO: 966 - protein, 7 aa, Artificial Sequence
  Description of Artificial Sequence: Synthetic peptide
FGTSSGL

SEQ ID NO: 967 - protein, 7 aa, Artificial Sequence
  Description of Artificial Sequence: Synthetic peptide
YESSPSW

SEQ ID NO: 968 - protein, 7 aa, Artificial Sequence
  Description of Artificial Sequence: Synthetic peptide
YGSPPRF

SEQ ID NO: 969 - protein, 7 aa, Artificial Sequence
  Description of Artificial Sequence: Synthetic peptide
YGSSPSW

SEQ ID NO: 970 - protein, 7 aa, Artificial Sequence
  Description of Artificial Sequence: Synthetic peptide
YDSSPSW

SEQ ID NO: 971 - protein, 7 aa, Artificial Sequence
  Description of Artificial Sequence: Synthetic peptide
YGTSPMY

SEQ ID NO: 972 - protein, 6 aa, Artificial Sequence
  Description of Artificial Sequence: Synthetic peptide
ALQTPL

SEQ ID NO: 973 - protein, 8 aa, Artificial Sequence
  Description of Artificial Sequence: Synthetic peptide
YGNSPPKF

SEQ ID NO: 974 - protein, 7 aa, Artificial Sequence
  Description of Artificial Sequence: Synthetic peptide
YGGSPRL

SEQ ID NO: 975 - protein, 6 aa, Artificial Sequence
  Description of Artificial Sequence: Synthetic peptide
HYSTPW

SEQ ID NO: 976 - protein, 6 aa, Artificial Sequence
  Description of Artificial Sequence: Synthetic peptide
SRIFPR

SEQ ID NO: 977 - protein, 6 aa, Artificial Sequence
  Description of Artificial Sequence: Synthetic peptide
SRTIPR

SEQ ID NO: 978 - protein, 5 aa, Artificial Sequence
  Description of Artificial Sequence: Synthetic peptide
NHGMS

SEQ ID NO: 979 - protein, 5 aa, Artificial Sequence
  Description of Artificial Sequence: Synthetic peptide
NYAMS

SEQ ID NO: 980 - protein, 5 aa, Artificial Sequence
  Description of Artificial Sequence: Synthetic peptide
DYAMH

SEQ ID NO: 981 - protein, 5 aa, Artificial Sequence
  Description of Artificial Sequence: Synthetic peptide
NFGIN

SEQ ID NO: 982 - protein, 5 aa, Artificial Sequence
  Description of Artificial Sequence: Synthetic peptide
SDAMT

SEQ ID NO: 983 - protein, 5 aa, Artificial Sequence
  Description of Artificial Sequence: Synthetic peptide
NYGIT

SEQ ID NO: 984 - protein, 5 aa, Artificial Sequence
  Description of Artificial Sequence: Synthetic peptide
DYYMS

SEQ ID NO: 985 - protein, 7 aa, Artificial Sequence
  Description of Artificial Sequence: Synthetic peptide
SSYYYWG

SEQ ID NO: 986 - protein, 7 aa, Artificial Sequence
  Description of Artificial Sequence: Synthetic peptide
TSGMCVS

SEQ ID NO: 987 - protein, 5 aa, Artificial Sequence
  Description of Artificial Sequence: Synthetic peptide
SYSMN

SEQ ID NO: 988 - protein, 5 aa, Artificial Sequence
  Description of Artificial Sequence: Synthetic peptide
SHYIH

SEQ ID NO: 989 - protein, 7 aa, Artificial Sequence
  Description of Artificial Sequence: Synthetic peptide
SGGYYWS

SEQ ID NO: 990 - protein, 5 aa, Artificial Sequence
  Description of Artificial Sequence: Synthetic peptide
SYAIS

SEQ ID NO: 991 - protein, 7 aa, Artificial Sequence
  Description of Artificial Sequence: Synthetic peptide
SNSAAWN

SEQ ID NO: 992 - protein, 5 aa, Artificial Sequence
  Description of Artificial Sequence: Synthetic peptide
SYAMS

SEQ ID NO: 993 - protein, 5 aa, Artificial Sequence
  Description of Artificial Sequence: Synthetic peptide
RYPMS

SEQ ID NO: 994 - protein, 5 aa, Artificial Sequence
  Description of Artificial Sequence: Synthetic peptide
NFGMN

SEQ ID NO: 995 - protein, 5 aa, Artificial Sequence
  Description of Artificial Sequence: Synthetic peptide
DYSIN

SEQ ID NO: 996 - protein, 5 aa, Artificial Sequence
  Description of Artificial Sequence: Synthetic peptide
HYSMN

SEQ ID NO: 997 - protein, 16 aa, Artificial Sequence
  Description of Artificial Sequence: Synthetic peptide
GIVYSGSTYYAASVKG

SEQ ID NO: 998 - protein, 17 aa, Artificial Sequence
  Description of Artificial Sequence: Synthetic peptide
GISRSGENTYYADSVKG

SEQ ID NO: 999 - protein, 17 aa, Artificial Sequence
  Description of Artificial Sequence: Synthetic peptide
GISWNSGSIGYADSVKG

SEQ ID NO: 1000 - protein, 17 aa, Artificial Sequence
  Description of Artificial Sequence: Synthetic peptide
WINPKNNNTNYAQKFQG

SEQ ID NO: 1001 - protein, 17 aa, Artificial Sequence
  Description of Artificial Sequence: Synthetic peptide
VISGSGGTTYYADSVKG

SEQ ID NO: 1002 - protein, 17 aa, Artificial Sequence
  Description of Artificial Sequence: Synthetic peptide
WISAYNGNTNYAQKFQG

SEQ ID NO: 1003 - protein, 17 aa, Artificial Sequence
  Description of Artificial Sequence: Synthetic peptide
YISSSGSTIYYADSVKG

SEQ ID NO: 1004 - protein, 17 aa, Artificial Sequence
  Description of Artificial Sequence: Synthetic peptide
YISSSGNTIYYADSVKG

SEQ ID NO: 1005 - protein, 16 aa, Artificial Sequence
  Description of Artificial Sequence: Synthetic peptide
SIYYSGSAYYNPSLKS

SEQ ID NO: 1006 - protein, 16 aa, Artificial Sequence
  Description of Artificial Sequence: Synthetic peptide
RIDWDEDKFYSTSLKT

SEQ ID NO: 1007 - protein, 17 aa, Artificial Sequence
  Description of Artificial Sequence: Synthetic peptide
SISSSSSYIYYADSVKG

SEQ ID NO: 1008 - protein, 17 aa, Artificial Sequence
  Description of Artificial Sequence: Synthetic peptide
MINPSGGVTAYSQTLQG

SEQ ID NO: 1009 - protein, 16 aa, Artificial Sequence
  Description of Artificial Sequence: Synthetic peptide
YIYYSGSTYYNPSLKS

SEQ ID NO: 1010 - protein, 17 aa, Artificial Sequence
  Description of Artificial Sequence: Synthetic peptide
GIIPIFGTANYAQKFQG

SEQ ID NO: 1011 - protein, 18 aa, Artificial Sequence
  Description of Artificial Sequence: Synthetic peptide
RTYYRSKWYSFYAISLKS

SEQ ID NO: 1012 - protein, 17 aa, Artificial Sequence
  Description of Artificial Sequence: Synthetic peptide
AISGSGGSTYYADSVKG

SEQ ID NO: 1013 - protein, 17 aa, Artificial Sequence
  Description of Artificial Sequence: Synthetic peptide
GISDSGVSTYYADSAKG

SEQ ID NO: 1014 - protein, 17 aa, Artificial Sequence
  Description of Artificial Sequence: Synthetic peptide
SINWKGNSLAYGDSVKG

SEQ ID NO: 1015 - protein, 17 aa, Artificial Sequence
  Description of Artificial Sequence: Synthetic peptide
WINTYTGESYFADDFKG

SEQ ID NO: 1016 - protein, 17 aa, Artificial Sequence
  Description of Artificial Sequence: Synthetic peptide
WINTETREPAYAYDFRG

SEQ ID NO: 1017 - protein, 17 aa, Artificial Sequence
  Description of Artificial Sequence: Synthetic peptide
RINTESGVPIYADDFKG

SEQ ID NO: 1018 - protein, 17 aa, Artificial Sequence
  Description of Artificial Sequence: Synthetic peptide
RINTETGEPLYADDFKG

SEQ ID NO: 1019 - protein, 7 aa, Artificial Sequence
  Description of Artificial Sequence: Synthetic peptide
HGGESDV

SEQ ID NO: 1020 - protein, 11 aa, Artificial Sequence
  Description of Artificial Sequence: Synthetic peptide
SPAHYYGGMDV

SEQ ID NO: 1021 - protein, 6 aa, Artificial Sequence
  Description of Artificial Sequence: Synthetic peptide
HSFLAY

SEQ ID NO: 1022 - protein, 11 aa, Artificial Sequence
  Description of Artificial Sequence: Synthetic peptide
GPYYYQSYMDV

SEQ ID NO: 1023 - protein, 14 aa, Artificial Sequence
  Description of Artificial Sequence: Synthetic peptide
LDSSGYYYARGPRY

SEQ ID NO: 1024 - protein, 9 aa, Artificial Sequence
  Description of Artificial Sequence: Synthetic peptide
GPYYYYMDV

SEQ ID NO: 1025 - protein, 8 aa, Artificial Sequence
  Description of Artificial Sequence: Synthetic peptide
ESGDGMDV

SEQ ID NO: 1026 - protein, 8 aa, Artificial Sequence
  Description of Artificial Sequence: Synthetic peptide
STMVREDY

SEQ ID NO: 1027 - protein, 11 aa, Artificial Sequence
  Description of Artificial Sequence: Synthetic peptide
HWQEWPDAFDI

SEQ ID NO: 1028 - protein, 13 aa, Artificial Sequence
  Description of Artificial Sequence: Synthetic peptide
SGAGGTSATAFDI

SEQ ID NO: 1029 - protein, 10 aa, Artificial Sequence
  Description of Artificial Sequence: Synthetic peptide
TIAAVYAFDI

SEQ ID NO: 1030 - protein, 8 aa, Artificial Sequence
  Description of Artificial Sequence: Synthetic peptide
DLRGAFDI

SEQ ID NO: 1031 - protein, 11 aa, Artificial Sequence
  Description of Artificial Sequence: Synthetic peptide
EGSGSGWYFDF

SEQ ID NO: 1032 - protein, 13 aa, Artificial Sequence
  Description of Artificial Sequence: Synthetic peptide
AGIAARLRGAFDI

SEQ ID NO: 1033 - protein, 20 aa, Artificial Sequence
  Description of Artificial Sequence: Synthetic peptide
RGGYQLLRWDVGLLRSAFDI

SEQ ID NO: 1034 - protein, 13 aa, Artificial Sequence
  Description of Artificial Sequence: Synthetic peptide
SSPEGLFLYWFDP

SEQ ID NO: 1035 - protein, 9 aa, Artificial Sequence
  Description of Artificial Sequence: Synthetic peptide
VEGSGSLDY

SEQ ID NO: 1036 - protein, 9 aa, Artificial Sequence
  Description of Artificial Sequence: Synthetic peptide
RAGSEASDI

SEQ ID NO: 1037 - protein, 15 aa, Artificial Sequence
  Description of Artificial Sequence: Synthetic peptide
ATYKRELRYYYGMDV

SEQ ID NO: 1038 - protein, 8 aa, Artificial Sequence
  Description of Artificial Sequence: Synthetic peptide
VGKAVPDV

SEQ ID NO: 1039 - protein, 13 aa, Artificial Sequence
  Description of Artificial Sequence: Synthetic peptide
HQGVAYYNYAMDV

SEQ ID NO: 1040 - protein, 8 aa, Artificial Sequence
  Description of Artificial Sequence: Synthetic peptide
VVRDGMDV

SEQ ID NO: 1041 - protein, 9 aa, Artificial Sequence
  Description of Artificial Sequence: Synthetic peptide
IPQTGTFDY

SEQ ID NO: 1042 - protein, 15 aa, Artificial Sequence
  Description of Artificial Sequence: Synthetic peptide
ANYKRELRYYYGMDV

SEQ ID NO: 1043 - protein, 11 aa, Artificial Sequence
  Description of Artificial Sequence: Synthetic peptide
ALVGATGAFDI

SEQ ID NO: 1044 - protein, 8 aa, Artificial Sequence
  Description of Artificial Sequence: Synthetic peptide
WFGEGFDP

SEQ ID NO: 1045 - protein, 17 aa, Artificial Sequence
  Description of Artificial Sequence: Synthetic peptide
VGYDSSGYYRDYYGMDV

SEQ ID NO: 1046 - protein, 13 aa, Artificial Sequence
  Description of Artificial Sequence: Synthetic peptide
MGWSSGYLGAFDI

SEQ ID NO: 1047 - protein, 13 aa, Artificial Sequence
  Description of Artificial Sequence: Synthetic peptide
GEIYYGYDGGFAY

SEQ ID NO: 1048 - protein, 8 aa, Artificial Sequence
  Description of Artificial Sequence: Synthetic peptide
DYSYAMDY

SEQ ID NO: 1049 - protein, 8 aa, Artificial Sequence
  Description of Artificial Sequence: Synthetic peptide
DYLYSLDF

SEQ ID NO: 1050 - protein, 8 aa, Artificial Sequence
  Description of Artificial Sequence: Synthetic peptide
DYLYSCDY

SEQ ID NO: 1051 - protein, 7 aa, Artificial Sequence
  Description of Artificial Sequence: Synthetic peptide
GFALSNH

SEQ ID NO: 1052 - protein, 7 aa, Artificial Sequence
  Description of Artificial Sequence: Synthetic peptide
GFTFSNY

SEQ ID NO: 1053 - protein, 7 aa, Artificial Sequence
  Description of Artificial Sequence: Synthetic peptide
GFTFDDY

SEQ ID NO: 1054 - protein, 7 aa, Artificial Sequence
  Description of Artificial Sequence: Synthetic peptide
GYIFDNF

SEQ ID NO: 1055 - protein, 7 aa, Artificial Sequence
  Description of Artificial Sequence: Synthetic peptide
GFTFSSD

SEQ ID NO: 1056 - protein, 7 aa, Artificial Sequence
  Description of Artificial Sequence: Synthetic peptide
GYTFSNY

SEQ ID NO: 1057 - protein, 7 aa, Artificial Sequence
  Description of Artificial Sequence: Synthetic peptide
GFTFSDY

SEQ ID NO: 1058 - protein, 9 aa, Artificial Sequence
  Description of Artificial Sequence: Synthetic peptide
GGSISSSYY

SEQ ID NO: 1059 - protein, 9 aa, Artificial Sequence
  Description of Artificial Sequence: Synthetic peptide
GFSLRTSGM

SEQ ID NO: 1060 - protein, 7 aa, Artificial Sequence
  Description of Artificial Sequence: Synthetic peptide
GFTFSSY

SEQ ID NO: 1061 - protein, 7 aa, Artificial Sequence
  Description of Artificial Sequence: Synthetic peptide
GYTVTSH

SEQ ID NO: 1062 - protein, 9 aa, Artificial Sequence
  Description of Artificial Sequence: Synthetic peptide
GGSISSGGY

SEQ ID NO: 1063 - protein, 7 aa, Artificial Sequence
  Description of Artificial Sequence: Synthetic peptide
GGTFSSY

SEQ ID NO: 1064 - protein, 9 aa, Artificial Sequence
  Description of Artificial Sequence: Synthetic peptide
GDSVSSNSA

SEQ ID NO: 1065 - protein, 7 aa, Artificial Sequence
  Description of Artificial Sequence: Synthetic peptide
GITFSRY

SEQ ID NO: 1066 - protein, 7 aa, Artificial Sequence
  Description of Artificial Sequence: Synthetic peptide
GFSFSSY

SEQ ID NO: 1067 - protein, 7 aa, Artificial Sequence
  Description of Artificial Sequence: Synthetic peptide
GYTFTNF

SEQ ID NO: 1068 - protein, 7 aa, Artificial Sequence
  Description of Artificial Sequence: Synthetic peptide
GYTFTDY

SEQ ID NO: 1069 - protein, 7 aa, Artificial Sequence
  Description of Artificial Sequence: Synthetic peptide
GYTFRHY

SEQ ID NO: 1070 - protein, 7 aa, Artificial Sequence
  Description of Artificial Sequence: Synthetic peptide
GYTFTHY

SEQ ID NO: 1071 - protein, 5 aa, Artificial Sequence
  Description of Artificial Sequence: Synthetic peptide
VYSGS

SEQ ID NO: 1072 - protein, 6 aa, Artificial Sequence
  Description of Artificial Sequence: Synthetic peptide
SRSGEN

SEQ ID NO: 1073 - protein, 6 aa, Artificial Sequence
  Description of Artificial Sequence: Synthetic peptide
SWNSGS

SEQ ID NO: 1074 - protein, 6 aa, Artificial Sequence
  Description of Artificial Sequence: Synthetic peptide
NPKNNN

SEQ ID NO: 1075 - protein, 6 aa, Artificial Sequence
  Description of Artificial Sequence: Synthetic peptide
SGSGGT

SEQ ID NO: 1076 - protein, 6 aa, Artificial Sequence
  Description of Artificial Sequence: Synthetic peptide
SAYNGN

SEQ ID NO: 1077 - protein, 6 aa, Artificial Sequence
  Description of Artificial Sequence: Synthetic peptide
SSSGST

SEQ ID NO: 1078 - protein, 6 aa, Artificial Sequence
  Description of Artificial Sequence: Synthetic peptide
SSSGNT

SEQ ID NO: 1079 - protein, 5 aa, Artificial Sequence
  Description of Artificial Sequence: Synthetic peptide
YYSGS

SEQ ID NO: 1080 - protein, 5 aa, Artificial Sequence
  Description of Artificial Sequence: Synthetic peptide
DWDED

SEQ ID NO: 1081 - protein, 6 aa, Artificial Sequence
  Description of Artificial Sequence: Synthetic peptide
SSSSSY

SEQ ID NO: 1082 - protein, 6 aa, Artificial Sequence
  Description of Artificial Sequence: Synthetic peptide
NPSGGV

SEQ ID NO: 1083 - protein, 6 aa, Artificial Sequence
  Description of Artificial Sequence: Synthetic peptide
IPIFGT

SEQ ID NO: 1084 - protein, 7 aa, Artificial Sequence
  Description of Artificial Sequence: Synthetic peptide
YYRSKWY

SEQ ID NO: 1085 - protein, 6 aa, Artificial Sequence
  Description of Artificial Sequence: Synthetic peptide
SGSGGS

SEQ ID NO: 1086 - protein, 6 aa, Artificial Sequence
  Description of Artificial Sequence: Synthetic peptide
SDSGVS

SEQ ID NO: 1087 - protein, 6 aa, Artificial Sequence
  Description of Artificial Sequence: Synthetic peptide
NWKGNS

SEQ ID NO: 1088 - protein, 6 aa, Artificial Sequence
  Description of Artificial Sequence: Synthetic peptide
NTYTGE

SEQ ID NO: 1089 - protein, 6 aa, Artificial Sequence
  Description of Artificial Sequence: Synthetic peptide
NTETRE

SEQ ID NO: 1090 - protein, 6 aa, Artificial Sequence
  Description of Artificial Sequence: Synthetic peptide
NTESGV

SEQ ID NO: 1091 - protein, 6 aa, Artificial Sequence
  Description of Artificial Sequence: Synthetic peptide
NTETGE

SEQ ID NO: 1092 - protein, 10 aa, Artificial Sequence
  Description of Artificial Sequence: Synthetic peptide
GFALSNHGMS

SEQ ID NO: 1093 - protein, 10 aa, Artificial Sequence
  Description of Artificial Sequence: Synthetic peptide
GFTFSNYAMS

SEQ ID NO: 1094 - protein, 10 aa, Artificial Sequence
  Description of Artificial Sequence: Synthetic peptide
GFTFDDYAMH

SEQ ID NO: 1095 - protein, 10 aa, Artificial Sequence
  Description of Artificial Sequence: Synthetic peptide
GYIFDNFGIN

SEQ ID NO: 1096 - protein, 10 aa, Artificial Sequence
  Description of Artificial Sequence: Synthetic peptide
GFTFSSDAMT

SEQ ID NO: 1097 - protein, 10 aa, Artificial Sequence
  Description of Artificial Sequence: Synthetic peptide
GYTFSNYGIT

SEQ ID NO: 1098 - protein, 10 aa, Artificial Sequence
  Description of Artificial Sequence: Synthetic peptide
GFTFSDYYMS

SEQ ID NO: 1099 - protein, 12 aa, Artificial Sequence
  Description of Artificial Sequence: Synthetic peptide
GGSISSSYYYWG

SEQ ID NO: 1100 - protein, 12 aa, Artificial Sequence
  Description of Artificial Sequence: Synthetic peptide
GFSLRTSGMCVS

SEQ ID NO: 1101 - protein, 10 aa, Artificial Sequence
  Description of Artificial Sequence: Synthetic peptide
GFTFSSYSMN

SEQ ID NO: 1102 - protein, 10 aa, Artificial Sequence
  Description of Artificial Sequence: Synthetic peptide
GYTVTSHYIH

SEQ ID NO: 1103 - protein, 12 aa, Artificial Sequence
  Description of Artificial Sequence: Synthetic peptide
GGSISSGGYYWS

SEQ ID NO: 1104 - protein, 10 aa, Artificial Sequence
  Description of Artificial Sequence: Synthetic peptide
GGTFSSYAIS

SEQ ID NO: 1105 - protein, 12 aa, Artificial Sequence
  Description of Artificial Sequence: Synthetic peptide
GDSVSSNSAAWN

SEQ ID NO: 1106 - protein, 10 aa, Artificial Sequence
  Description of Artificial Sequence: Synthetic peptide
GFTFSSYAMS

SEQ ID NO: 1107 - protein, 10 aa, Artificial Sequence
  Description of Artificial Sequence: Synthetic peptide
GITFSRYPMS

SEQ ID NO: 1108 - protein, 10 aa, Artificial Sequence
  Description of Artificial Sequence: Synthetic peptide
GFSFSSYAMS

SEQ ID NO: 1109 - protein, 10 aa, Artificial Sequence
  Description of Artificial Sequence: Synthetic peptide
GYTFTNFGMN

SEQ ID NO: 1110 - protein, 10 aa, Artificial Sequence
  Description of Artificial Sequence: Synthetic peptide
GYTFTDYSIN

SEQ ID NO: 1111 - protein, 10 aa, Artificial Sequence
  Description of Artificial Sequence: Synthetic peptide
GYTFRHYSMN

SEQ ID NO: 1112 - protein, 10 aa, Artificial Sequence
  Description of Artificial Sequence: Synthetic peptide
GYTFTHYSMN

SEQ ID NO: 1113 - protein, 4 aa, Artificial Sequence
  Description of Artificial Sequence: Synthetic peptide
RGDS

1. A CD3 binding molecule that specifically binds to human CD3 and comprises a CDR-H1 sequence, a CDR-H2 sequence a CDR-H3 sequence, a CDR-L1 sequence, a CDR-L2 sequence, and a CDR-L3 sequence set forth in Table 1A, Table 1B, or Table 1C.

2-4. (canceled)

5. The CD3 binding molecule of claim 1, comprises CDR-H1 CDR-H2, and CDR-H3 sequences set forth in Table 1D-1, Table 1E-1, Table 1F-1, Table 1G-1, Table 1H-1, or Table 1I-1, and the corresponding CDR-L1, CDR-L2, and CDR-L3 sequences set forth in Table 1D-2, Table 1E-2, Table 1F-2, Table 1G-2, Table 1H-2, or Table 1I-2, respectfully.

6-21. (canceled)

22. The CD3 binding molecule of claim 5, which comprises a heavy chain variable sequence set forth in Table 1J-1 and the corresponding light chain variable sequence set forth in Table 1J-2.

23. The CD3 binding molecule of claim 1, which comprises an antibody, an antibody fragment, an scFv, a dsFv, a Fv, a Fab, an scFab, a (Fab′)2, or a single domain antibody (SDAB).

24-25. (canceled)

26. The CD3 binding molecule of claim 1, which is a multispecific binding molecule.

27. The CD3 binding molecule of claim 26, which is a bispecific binding molecule (BBM).

28. The CD3 binding molecule of claim 27, wherein the BBM comprises:
(a) an antigen binding module 1 (ABM1) that binds specifically to CD3; and comprises heavy and light chain variable regions of the CD3 binding molecule of claim 1; and
(b) an antigen binding module 2 (ABM2) that binds specifically to a tumor-associated antigen (“TAA”).

29-32. (canceled)

33. The CD3 binding molecule of claim 26, which is a trispecific binding molecule (TBM).

34. The CD3 binding molecule of claim 29-32, wherein the TBM comprises:
(a) an antigen binding module 1 (ABM1) that binds specifically to CD3 and comprises heavy and light chain variable regions of the CD3 binding molecule of claim 1; and
(b) an antigen binding module 2 (ABM2) that binds specifically to a tumor-associated antigen; and
(c) an antigen binding module 3 (ABM3) that binds specifically to:
(i) a tumor-associated antigen other than the tumor-associated antigen bound by ABM2; or
(ii) CD2.

35. The CD3 binding molecule of claim 34, in which ABM1 is capable of binding CD3 at the same time ABM2 and ABM3 are bound to their target molecules.

36-39. (canceled)

40. The CD3 binding molecule of claim 34, wherein ABM2 specifically binds a TAA which is CD19, BCMA, TSHR, CD171, CS-1, CLL-1, GD3, Tn Ag, FLT3, CD38, CD44v6, B7H3, KIT, IL-13Ra2, IL-11Ra, PSCA, PRSS21, VEGFR2, LewisY, CD24, PDGFR-beta, SSEA-4, MUC1, EGFR, NCAM, CAIX, LMP2, EphA2, fucosyl GM1, sLe, GM3, TGS5, HMWMAA, o-acetyl-GD2, GD2, folate receptor alpha, folate receptor beta, TEM1/CD248, TEM7R, CLDN6, GPRC5D, CXORF61, CD97, CD179a, ALK, polysialic acid, PLAC1, GloboH, NY-BR-1, UPK2, HAVCR1, ADRB3, PANX3, GPR20, LY6K, OR51E2, TAARP, WT1, ETV6-AML, sperm protein 17, XAGE1, Tie 2, MAD-CT-1, MAD-CT-2, Fos-related antigen 1, p53 mutant, hTERT, sarcoma translocation breakpoints, ML-IAP, ERG (TMPRSS2 ETS fusion gene), NA17, PAX3, Androgen receptor, Cyclin B1, MYCN, RhoC, CYP1B1, BORIS, SART3, PAX5, OY-TES1, LCK, AKAP-4, SSX2, CD79a, CD79b, CD72, LAIR1, FCAR, LILRA2, CD300LF, CLEC12A, BST2, EMR2, LY75, GPC3, FCRL5, IGLL1, CD20, CD30, ERBB2, ROR1, FLT3, TAAG72, CD22, CD33, GD2, gp100Tn, FAP, tyrosinase, EPCAM, CEA, Igf-I receptor, EphB2, mesothelin, Cadherin17, CD32b, EGFRvIII, GPNMB, GPR64, HER3, LRP6, LYPD8, NKG2D, SLC34A2, SLC39A6, SLITRK6, or TACSTD2.

41. The CD3 binding molecule of claim 40, wherein ABM3 binds CD2.

42-43. (canceled)

44. A conjugate comprising the CD3 binding molecule of claim 1 and an agent.

45. A pharmaceutical composition comprising the CD3 binding molecule of claim 1 and a pharmaceutically acceptable excipient.

46. A method of treating a subject having a proliferative disease or an autoimmune disorder comprising administering to the subject the CD3 binding molecule of claim 1.

47. A nucleic acid or plurality of nucleic acids encoding the CD3 binding molecule of claim 1.

48. A cell engineered to express the CD3 binding molecule of claim 1.

49. A method of producing a CD3 binding molecule, comprising:
(a) culturing the cell of claim 48 in conditions under which the CD3 binding molecule is expressed; and
(b) recovering the CD3 binding molecule from the cell culture.
